(19) United States
(12) Patent Application Publication
(10) Pub. No.: US 2010/0150918 A1
(43) Pub. Date: Jun. 17, 2010

(54) CROSS-SPECIES-SPECIFIC BINDING DOMAIN

(75) Inventors: Peter Kufer, Moosburg (DE); Tobias Raum, Munich (DE); Roman Kischel, Karlsfeld (DE); Ralf Lutterbuese, Neuried (DE); Patrick Hoffmann, Bad Heilbrunn (DE); Matthias Klinger, Gilching (DE); Doris Rau, Unterhaching (DE); Susanne Mangold, Munich (DE)

Correspondence Address: FOLEY AND LARDNER LLP;SUITE 500, 3000 K STREET NW, WASHINGTON, DC, 20007, US

(73) Assignee: MICROMET AG, Munich (DE)

(21) Appl. No.: 12/594,713

(22) PCT Filed: Apr. 3, 2008
(86) PCT No.: PCT/EP2008/002664

§ 371 Date: Oct. 9, 2009

Related U.S. Application Data
(60) Provisional application No. 60/913,668, filed on Apr. 24, 2007.

(30) Foreign Application Priority Data
Apr. 3, 2007 (EP) 07006988.5
Apr. 3, 2007 (EP) 07006990.1
Mar. 13, 2008 (EP) 08004741.8

(51) Int. Cl. A61K 39/395; C07K 16/28; C07H 21/04; C12N 15/63; A61P 35/00; A61P 37/00

(52) U.S. Cl. 424/133.1; 530/387.3; 536/23.53; 435/320.1

(57) ABSTRACT

The present invention relates to a polypeptide comprising a human binding domain capable of binding to an epitope of human and non-chimpanzee primate CD3 (epsilon) chain as well as to a process for the production of the mentioned polypeptide. The invention further relates to nucleic acids encoding for the polypeptide, to vectors comprising the same and to host cells comprising the vector. In another aspect, the invention provides for a pharmaceutical composition comprising the mentioned polypeptide and medical uses of the polypeptide. In a further aspect the invention provides a method for the identification of polypeptides comprising a cross-species specific binding domain capable of binding to an epitope of human and non-chimpanzee primate CD3ε (CD3 epsilon).

[0001] The present invention relates to a polypeptide comprising a first human binding domain capable of binding to an epitope of human and non-chimpanzee primate CD3 (epsilon) as well as to a process for the production of the mentioned polypeptide. The invention further relates to nucleic acids encoding for the polypeptide, to vectors comprising the same and to host cells comprising the vector. In another aspect, the invention provides for a pharmaceutical composition comprising the mentioned polypeptide and medical uses of the polypeptide.

[0002] T cell recognition is mediated by clonotypically distributed alpha beta and gamma delta T cell receptors (TcR) that interact with the peptide-loaded molecules of the peptide MHC (pMHC) (Davis & Bjorkman, Nature 334 (1988), 395-402). The antigen-specific chains of the TcR do not possess signalling domains but instead are coupled to the conserved multisubunit signaling apparatus CD3 (Call, Cell 111 (2002), 967-979, Alarcon, Immunol. Rev. 191 (2003), 38-46, Malissen Immunol. Rev. 191 (2003), 7-27). The mechanism by which TcR ligation is directly communicated to the signalling apparatus remains a fundamental question in T cell biology (Alarcon, loc. cit.; Davis, Cell 110 (2002), 285-287). It seems clear that sustained T cell responses involve coreceptor engagement, TcR oligomerization, and a higher order arrangement of TcR-pMHC complexes in the immunological synapse (Davis & van der Merwe, Curr. Biol. 11 (2001), R289-R291, Davis, Nat. Immunol. 4 (2003), 217-224). However very early TcR signalling occurs in the absence of these events and may involve a ligand-induced conformational change in CD3 epsilon (Alarcon, loc. cit., Davis (2002), loc. cit., Gil, J. Biol. Chem. 276 (2001), 11174-11179, Gil, Cell 109 (2002), 901-912). The epsilon, gamma, delta and zeta subunits of the signaling complex associate with each other to form a CD3 epsilon-gamma heterodimer, a CD3 epsilon-delta. heterodimer, and a CD3 zeta-zeta homodimer (Call, loc. cit.). Various studies have revealed that the CD3 molecules are important for the proper cell surface expression of the alpha beta TcR and normal T cell development (Berkhout, J. Biol. Chem. 263 (1988), 8528-8536, Wang, J. Exp. Med. 188 (1998), 1375-1380, Kappes, Curr. Opin. Immunol. 7 (1995), 441-447). The solution structure of the ectodomain fragments of the mouse CD3 epsilon gamma heterodimer showed that the epsilon gamma subunits are both C2-set Ig domains that interact with each other to form an unusual side-to-side dimer configuration (Sun, Cell 105 (2001), 913-923). Although the cysteine-rich stalk appears to play an important role in driving CD3 dimerization (Su, loc. cit., Borroto, J. Biol. Chem. 273 (1998), 12807-12816), interaction by means of the extracellular domains of CD3 epsilon and CD3 gamma is sufficient for assembly of these proteins with TcR beta (Manolios, Eur. J. Immunol. 24 (1994), 84-92, Manolios & Li, Immunol. Cell Biol. 73 (1995), 532-536). Although still controversial, the dominant stoichiometry of the TcR most likely comprises one alpha beta TcR, one CD3 epsilon gamma heterodimer, one CD3 epsilon delta heterodimer and one CD3 zeta zeta homodimer (Call, loc. cit.). Given the central role of the human CD3 epsilon gamma heterodimer in the immune response, the crystal structure of this complex bound to the therapeutic antibody OKT3 has recently been elucidated (Kjer-Nielsen, PNAS 101, (2004), 7675-7680).

[0003] A number of therapeutic strategies modulate T cell immunity by targeting TcR signaling, particularly the anti-human CD3 monoclonal antibodies (mAbs) that are widely used clinically in immunosuppressive regimes. The CD3-specific mouse mAb OKT3 was the first mAb licensed for use in humans (Sgro, Toxicology 105 (1995), 23-29) and is widely used clinically as an immunosuppressive agent in transplantation (Chatenoud, Clin. Transplant 7 (1993), 422-430, Chatenoud, Nat. Rev. Immunol. 3 (2003), 123-132, Kumar, Transplant. Proc. 30 (1998), 1351-1352), type 1 diabetes (Chatenoud (2003), loc. cit.), and psoriasis (Utset, J. Rheumatol. 29 (2002), 1907-1913). Moreover, anti-CD3 mAbs can induce partial T cell signalling and clonal anergy (Smith, J. Exp. Med. 185 (1997), 1413-1422). OKT3 has been described in the literature as a potent T cell mitogen (Van Wauve, J. Immunol. 124 (1980), 2708-18) as well as a potent T cell killer (Wong, Transplantation 50 (1990), 683-9). OKT3 exhibits both of these activities in a time-dependent fashion; following early activation of T cells leading to cytokine release, upon further administration OKT3 later blocks all known T cell functions. It is due to this later blocking of T cell function that OKT3 has found such wide application as an immunosuppressant in therapy regimens for reduction or even abolition of allograft tissue rejection.

[0004] OKT3 reverses allograft tissue rejection most probably by blocking the function of all T cells, which play a major role in acute rejection. OKT3 reacts with and blocks the function of the CD3 complex in the membrane of human T cells, which is associated with the antigen recognition structure of T cells (TCR) and is essential for signal transduction. Which subunit of the TCR/CD3 is bound by OKT3 has been the subject of multiple studies. Though some evidence has pointed to a specificity of OKT3 for the epsilon-subunit of the TCR/CD3 complex (Tunnacliffe, Int. Immunol. 1 (1989), 546-50; Kjer-Nielsen, PNAS 101, (2004), 7675-7680). Further evidence has shown that OKT3 binding of the TCR/CD3 complex requires other subunits of this complex to be present (Salmeron, J. Immunol. 147 (1991), 3047-52).

[0005] Other well known antibodies specific for the CD3 molecule are listed in Tunnacliffe, Int. Immunol. 1 (1989), 546-50. As indicated above, such CD3 specific antibodies are able to induce various T cell responses such as lymphokine production (Von Wussow, J. Immunol. 127 (1981), 1197; Palacious, J. Immunol. 128 (1982), 337), proliferation (Van Wauve, J. Immunol. 124 (1980), 2708-18) and suppressor-T cell induction (Kunicka, in “Lymphocyte Typing II” 1 (1986), 223). That is, depending on the experimental conditions, CD3 specific monoclonal antibody can either inhibit or induce cytotoxicity (Leewenberg, J. Immunol. 134 (1985), 3770; Phillips, J. Immunol. 136 (1986) 1579; Platsoucas, Proc. Natl. Acad. Sci. USA 78 (1981), 4500; Itoh, Cell. Immunol. 108 (1987), 283-96; Mentzer, J. Immunol. 135 (1985), 34; Landegren, J. Exp. Med. 155 (1982), 1579; Choi (2001), Eur. J. Immunol. 31, 94-106; Xu (2000), Cell Immunol. 200, 16-26; Kimball (1995), Transpl. Immunol. 3, 212-221).

[0006] Although many of the CD3 antibodies described in the art have been reported to recognize the CD3 epsilon subunit of the CD3 complex, most of them bind in fact to conformational epitopes and, thus, only recognize CD3 epsilon in the native context of the TCR. Conformational epitopes are characterized by the presence of two or more discrete amino acid residues which are separated in the primary sequence, but come together on the surface of the molecule when the polypeptide folds into the native protein/antigen (Sela, (1969) Science 166, 1365 and Laver, (1990) Cell 61, 553-6). The conformational epitopes bound by CD3 epsilon antibodies described in the art may be separated in two groups. In the major group, said epitopes are being formed by two CD3 subunits, e.g. of the CD3 epsilon chain and the CD3 gamma or CD3 delta chain. For example, it has been found in several studies that the most widely used CD3 epsilon monoclonal antibodies OKT3, WT31, UCHT1, 7D6 and Leu-4 did not bind to cells singly transfected with the CD3-epsilon chain. However, these antibodies stained cells doubly transfected with a combination of CD3 epsilon plus either CD3 gamma or CD3 delta (Tunnacliffe, loc. cit.; Law, Int. Immunol. 14 (2002), 389-400; Salmeron, J. Immunol. 147 (1991), 3047-52; Coulie, Eur. J. Immunol. 21 (1991), 1703-9). In a second smaller group, the conformational epitope is being formed within the CD3 epsilon subunit itself. A member of this group is for instance mAb APA 1/1 which has been raised against denatured CD3 epsilon (Risueno, Blood 106 (2005), 601-8). Taken together, most of the CD3 epsilon antibodies described in the art recognize conformational epitopes located on two or more subunits of CD3. The discrete amino acid residues forming the three-dimensional structure of these epitopes may hereby be located either on the CD3 epsilon subunit itself or on the CD3 epsilon subunit and other CD3 subunits such as CD3 gamma or CD3 delta.

[0007] Another problem with respect to CD3 antibodies is that many CD3 antibodies have been found to be species-specific. Anti-CD3 monoclonal antibodies—as holds generally true for any other monoclonal antibodies—function by way of highly specific recognition of their target molecules. They recognize only a single site, or epitope, on their target CD3 molecule. For example, one of the most widely used and best characterized monoclonal antibodies specific for the CD3 complex is OKT-3. This antibody reacts with chimpanzee CD3 but not with the CD3 homolog of other primates, such as macaques, or with dog CD3 (Sandusky et al., J. Med. Primatol. 15 (1986), 441-451). The anti-CD3 monoclonal antibody UCHT-1 is also reactive with CD3 from chimpanzee but not with CD3 from macaques (own data). On the other hand, there are also examples of monoclonal antibodies, which recognize macaque antigens, but not their human counterparts. One example of this group is monoclonal antibody FN-18 directed to CD3 from macaques (Uda et al., J. Med. Primatol. 30 (2001), 141-147). Interestingly, it has been found that peripheral lymphocytes from about 12% of cynomolgus monkeys lacked reactivity with anti-rhesus monkey CD3 monoclonal antibody (FN-18) due to a polymorphism of the CD3 antigen in macaques. Uda et al. described a substitution of two amino acids in the CD3 sequence of cynomolgus monkeys, which are not reactive with FN-18 antibodies, as compared to CD3 derived from animals, which are reactive with FN-18 antibodies (Uda et al., J Med Primatol. 32 (2003), 105-10; Uda et al., J Med Primatol. 33 (2004), 34-7).

[0008] This discriminatory ability, i.e. the species specificity, inherent to CD3 monoclonal antibodies and fragments thereof is a significant impediment to their development as therapeutic agents for the treatment of human diseases. In order to obtain market approval any new candidate medication must pass through rigorous testing. This testing can be subdivided into preclinical and clinical phases: Whereas the latter—further subdivided into the generally known clinical phases I, II and III—is performed in human patients, the former is performed in animals. The aim of pre-clinical testing is to prove that the drug candidate has the desired activity and most importantly is safe. Only when the safety in animals and possible effectiveness of the drug candidate has been established in preclinical testing this drug candidate will be approved for clinical testing in humans by the respective regulatory authority. Drug candidates can be tested for safety in animals in the following three ways, (i) in a relevant species, i.e. a species where the drug candidates can recognize the ortholog antigens, (ii) in a transgenic animal containing the human antigens and (iii) by use of a surrogate for the drug candidate that can bind the ortholog antigens present in the animal. Limitations of transgenic animals are that this technology is typically limited to rodents. Between rodents and man there are significant differences in the physiology and the safety results cannot be easily extrapolated to humans. The limitations of a surrogate for the drug candidate are the different composition of matter compared to the actual drug candidate and often the animals used are rodents with the limitation as discussed above. Therefore, preclinical data generated in rodents are of limited predictive power with respect to the drug candidate. The approach of choice for safety testing is the use of a relevant species, preferably a lower primate. The limitation now of the CD3 binding molecules suitable for therapeutic intervention in man described in the art is that the relevant species are higher primates, in particular chimpanzees. Chimpanzees are considered as endangered species and due to their human-like nature, the use of such animals for drug safety testing has been banned in Europe and is highly restricted elsewhere.

[0009] The present invention relates to a polypeptide comprising a, preferably human, binding domain capable of binding to an epitope of human and non-chimpanzee primate CD3ε](epsilon) chain, wherein the epitope is part of an amino acid sequence comprised in the group consisting of SEQ ID NOs. 2, 4, 6, or 8. Sequences as shown in SEQ ID NOs. 2, 4, 6 and 8 and functional fragments thereof are context independent CD3 epitopes.

[0010] The advantage of the present invention is the provision of a polypeptide comprising a binding domain exhibiting cross-species specificity to human and non-chimpanzee primate CD3ε (epsilon) chain, which can be used both for preclinical evaluation of safety, activity and/or pharmacokinetic profile of these binding domains in primates and—in the identical form—as drugs in humans. The same molecule can be used in preclinical animal studies as well as in clinical studies in humans. This leads to highly comparable results and a much-increased predictive power of the animal studies compared to species-specific surrogate molecules. In the present invention, an N-terminal 1-27 amino acid residue polypeptide fragment of the extracellular domain of CD3 epsilon was surprisingly identified which—in contrast to all other known epitopes of CD3 epsilon described in the art—maintains its three-dimensional structural integrity when taken out of its native environment in the CD3 complex (and fused to a heterologous amino acid sequence such as EpCAM or an immunoglobulin Fc part).

[0011] The context-independence of the CD3 epitope provided in this invention corresponds to the first 27 N-terminal amino acids of CD3 epsilon or functional fragments of this 27 amino acid stretch. The phrase “context-independent,” as used herein in relation to the CD3 epitope means that binding of the herein described inventive binding molecules/antibody molecules does not lead to a change or modification of the conformation, sequence, or structure surrounding the antigenic determinant or epitope. In contrast, the CD3 epitope recognized by a conventional CD3 binding molecule (e.g. as disclosed in WO 99/54440 or WO 04/106380) is localized on the CD3 epsilon chain C-terminal to the N-terminal 1-27 amino acids of the context-independent epitope, where it only takes the correct conformation if it is embedded within the rest of the epsilon chain and held in the right position by heterodimerization of the epsilon chain with either the CD3 gamma or delta chain.

[0012] Anti-CD3 binding molecules as part of a bispecific binding molecule as provided herein and generated (and directed) against a context-independent CD3 epitope provide for a surprising clinical improvement with regard to T cell redistribution and, thus, a more favourable safety profile. Without being bound by theory, since the CD3 epitope is context-independent, forming an autonomous selfsufficient subdomain without much influence on the rest of the CD3 complex, the CD3 binding molecules provided herein induce less allosteric changes in CD3 conformation than the conventional CD3 binding molecules (like molecules provided in WO 99/54440), which recognize context-dependent CD3 epitopes.

[0013] The context-independence of the CD3 epitope of CD3 binding molecules of the invention as part of a bispecific binding molecule is associated with less T cell redistribution during the starting phase of treatment with CD3 binding molecules of the invention resulting in a better safety profile of CD3 binding molecules of the invention compared to conventional CD3 binding molecules known in the art, which recognize context-dependent CD3 epitopes. Particularly, because T cell redistribution during the starting phase of treatment with CD3 binding molecules is a major risk factor for CNS adverse events, the CD3 binding molecules of the invention by recognizing a context-independent rather than a context-dependent CD3 epitope have a substantial safety advantage over the CD3 binding molecules known in the art. Patients with such CNS adverse events related to T cell redistribution during the starting phase of treatment with conventional CD3 binding molecules usually suffer from confusion and disorientation, in some cases also from urinary incontinence. Confusion is a change in mental status in which the patient is not able to think with his or her usual level of clarity. The patient usually has difficulties to concentrate and thinking is not only blurred and unclear but often significantly slowed down. Patients with CNS adverse events related to T cell redistribution during the starting phase of treatment with conventional CD3 binding molecules may also suffer from loss of memory. Frequently, the confusion leads to the loss of ability to recognize people and/or places, or tell time and the date. Feelings of disorientation are common in confusion, and the decision-making ability is impaired. CNS adverse events related to T cell redistribution during the starting phase of treatment with conventional CD3 binding molecules may further comprise blurred speech and/or word finding difficulties. This disorder may impair both, the expression and understanding of language as well as reading and writing. Besides urinary incontinence, also vertigo and dizziness may accompany CNS adverse events related to T cell redistribution during the starting phase of treatment with conventional CD3 binding molecules in some patients.

[0014] The maintenance of the three-dimensional structure within the mentioned 27 amino acid N-terminal polypeptide fragment of CD3 epsilon can be used for the generation of, preferably human, binding domains which are capable of binding to the N-terminal CD3 epsilon polypeptide fragment in vitro and to the native (CD3 epsilon subunit of the) CD3 complex on T cells in vivo with the same binding affinity. These data strongly indicate that the N-terminal fragment as described herein forms a tertiary conformation, which is similar to its structure normally existing in vivo. A very sensitive test for the importance of the structural integrity of the amino acid 1-27 of the N-terminal polypeptide fragment of CD3 epsilon was performed. Individual amino acids of amino acids 1-27 of the N-terminal polypeptide fragment of CD3 epsilon were changed to alanine (alanine scanning) to test the sensitivity of the amino acids 1-27 of the N-terminal polypeptide fragment of CD3 epsilon for minor disruptions. CD3 specific antibody molecules as part of a bispecific binding molecule of the invention were used to test for binding to the alanine-mutants of amino acids 1-27 of the N-terminal polypeptide fragment of CD3 epsilon (see appended Example 5). Individual exchanges of the first five amino acid residues at the very N-terminal end of the fragment and two of the amino acids at positions 23 and 25 of the amino acids 1-27 of the N-terminal polypeptide fragment of CD3 epsilon were critical for binding of the antibody molecules. The substitution of amino acid residues in the region of position 1-5 comprising the residues Q (Glutamine at position 1), D (Aspartic acid at position 2), G (Glycine at position 3), N (Asparagine at position 4), and E (Glutamic acid at position 5) to Alanine abolished binding of the, preferably human, binding molecules of the invention to said fragment. While, for at least some of the, preferably human, binding molecules of the invention, two amino acid residues at the C-terminus of the mentioned fragment T (Threonine at position 23) and I (Isoleucine at position 25) reduced the binding energy to the, preferably human, binding molecules of the invention.

[0015] Unexpectedly, it has been found that the thus isolated, preferably human, binding molecules not only recognize the human N-terminal fragment of CD3 epsilon, but also the corresponding homologous fragments of CD3 epsilon of various primates, including New-World Monkeys (Marmoset, Callithrix jacchus; Saguinus oedipus; Saimiri sciureus) and Old-World Monkeys (Macaca fascicularis, also known as Cynomolgus Monkey; or Macaca mulatta, also known as Rhesus Monkey). Thus, multi-primate specificity of the CD3-binding molecules of the invention was detected. The following sequence analyses confirmed that human and primates share a highly homologous sequence stretch at the N-terminus of the extracellular domain of CD3 epsilon.

[0016] It has been found in the present invention that it is possible to generate, preferably human, binding molecules specific for CD3 epsilon wherein the identical molecule can be used in preclinical animal testing, as well as clinical studies and even in therapy in human. This is due to the unexpected identification of, preferably human, binding molecules, which, in addition to binding to human CD3 epsilon (and due to genetic similarity likely to the chimpanzee counterpart), also bind to the homologs of said antigens of non-chimpanzee primates, including New-World Monkeys and Old-World Monkeys. As shown in the following Examples, said CD3 epsilon specific, preferably human, binding molecules can be integrated into bispecific single chain antibodies in order to generate therapeutics against various diseases, including but not limited to cancer or immunological disorders. Thus, the need to construct a surrogate CD3 epsilon binding domain or a bispecific single chain antibody including the same for testing in a phylogenetic distant (from humans) species disappears. As a result, the very same molecule can be used in animal preclinical testing as is intended to be administered to humans in clinical testing as well as following market approval and therapeutic drug administration. The ability to use the same molecule for preclinical animal testing as in later administration to humans virtually eliminates, or at least greatly reduces, the danger that the data obtained in preclinical animal testing have limited applicability to the human case. In short, obtaining preclinical safety data in animals using the same molecule as will actually be administered to humans does much to ensure the applicability of the data to a human-relevant scenario. In contrast, in conventional approaches using surrogate molecules, said surrogate molecules have to be molecularly adapted to the animal test system used for preclinical safety assessment. Thus, the molecule to be used in human therapy in fact differs in sequence and also likely in structure from the surrogate molecule used in preclinical testing in pharmacokinetic parameters and/or biological activity, with the consequence that data obtained in preclinical animal testing have limited applicability/transferability to the human case. The use of surrogate molecules requires the construction, production, purification and characterization of a completely new construct. This leads to additional development costs and time necessary to obtain that molecule. In sum, surrogates have to be developed separately in addition to the actual drug to be used in human therapy, so that two lines of development for two molecules have to be carried out. Therefore, a major advantage of the human binding molecule or a antibody-based constructs exhibiting cross-species specificity described herein is that the identical molecule can be used for therapeutics in humans and in preclinical animal testing.

[0017] It is preferred that binding molecules of the invention capable of binding to an epitope of the human and non-chimpanzee primate CD3 epsilon chain are of human origin.

[0018] In addition, due to the human origin of the human binding molecules of the invention the generation of an immune reaction against said binding molecules is excluded to the maximum possible extent upon administration of the binding molecules to human patients.

[0019] Another major advantage of the, preferably human, CD3 epsilon specific binding molecules as part of a bispecific binding molecule of the invention is their applicability for preclinical testing in various primates. The behavior of a drug candidate in animals should ideally be indicative of the expected behavior of this drug candidate upon administration to humans. As a result, the data obtained from such preclinical testing should therefore generally have a high predictive power for the human case. However, as learned from the tragic outcome of the recent Phase I clinical trial on TGN1412 (a CD28 monoclonal antibody), a drug candidate may act differently in a primate species than in humans: Whereas in preclinical testing of said antibody no or only limited adverse effects have been observed in animal studies performed with cynomolgus monkeys, six human patients developed multiple organ failure upon administration of said antibody (Lancet 368 (2006), 2206-7). The results of these not-desired negative events suggest that it may not be sufficient to limit preclinical testing to only one (primate) species. The fact that the CD3 epsilon specific human binding molecules of the invention bind to a series of New-World and Old-World Monkeys may help to overcome the problems faced in the case mentioned above. Accordingly, the present invention provides means and methods for minimizing species differences in effects when drugs for human therapy are being developed and tested.

[0020] With the, preferably human, cross-species specific CD3 epsilon binding domain as part of a bispecific binding molecule of the invention it is also no longer necessary to adapt the test animal to the drug candidate intended for administration to humans, such as e.g. the creation of transgenic animals. The CD3 epsilon specific, preferably human, binding molecules (or bispecific single chain antibodies containing the same), exhibiting cross-species specificity according to the uses and the methods of invention can be directly used for preclinical testing in non-chimpanzee primates, without any genetic manipulation of the animals. As well known to those skilled in the art, approaches in which the test animal is adapted to the drug candidate always bear the risk that the results obtained in the preclinical safety testing are less representative and predictive for humans due to the modification of the animal. For example, in transgenic animals, the proteins encoded by the transgenes are often highly over-expressed. Thus, data obtained for the biological activity of an antibody against this protein antigen may be limited in their predictive value for humans in which the protein is expressed at much lower, more physiological levels.

[0021] A further advantage of the uses of the CD3 epsilon specific, preferably human, binding molecules (or bispecific single chain antibodies containing the same) exhibiting cross-species specificity is the fact that chimpanzees as an endangered species are avoided for animal testing. Chimpanzees are the closest relatives to humans and were recently grouped into the family of hominids based on the genome sequencing data (Wildman et al., PNAS 100 (2003), 7181). Therefore, data obtained with chimpanzee is generally considered to be highly predictive for humans. However, due to their status as endangered species, the number of chimpanzees, which can be used for medical experiments, is highly restricted. As stated above, maintenance of chimpanzees for animal testing is therefore both costly and ethically problematic. The uses of CD3 epsilon specific, preferably human, binding molecules of the invention (or bispecific single chain antibodies containing the same) avoids both ethical objections and financial burden during preclinical testing without prejudicing the quality, i.e. applicability, of the animal testing data obtained. In light of this, the uses of CD3 epsilon specific, preferably human, binding molecules (or bispecific single chain antibodies containing the same) provides for a reasonable alternative for studies in chimpanzees.

[0022] A further advantage of the CD3 epsilon specific, preferably human, binding molecules of the invention (or bispecific single chain antibodies containing the same) is the ability of extracting multiple blood samples when using it as part of animal preclinical testing, for example in the course of pharmacokinetic animal studies. Multiple blood extractions can be much more readily obtained with a non-chimpanzee primate than with lower animals, e.g. a mouse. The extraction of multiple blood samples allows continuous testing of blood parameters for the determination of the biological effects induced by the, preferably human, binding molecule (or bispecific single chain antibody) of the invention. Furthermore, the extraction of multiple blood samples enables the researcher to evaluate the pharmacokinetic profile of the, preferably human, binding molecule (or bispecific single chain antibody containing the same) as defined herein. In addition, potential side effects, which may be induced by said, preferably human, binding molecule (or bispecific single chain antibody containing the same) reflected in blood parameters can be measured in different blood samples extracted during the course of the administration of said antibody. This allows the determination of the potential toxicity profile of the, preferably human, binding molecule (or bispecific single chain antibody containing the same) as defined herein.

[0023] The advantages of the, preferably human, binding molecules (or bispecific single chain antibodies) as defined herein exhibiting cross-species specificity may be briefly summarized as follows:

[0024] First, the, preferably human, binding molecules (or bispecific single chain antibodies) as defined herein used in preclinical testing is the same as the one used in human therapy. Thus, it is no longer necessary to develop two independent molecules, which may differ in their pharmacokinetic properties and biological activity. This is highly advantageous in that e.g. the pharmacokinetic results are more directly transferable and applicable to the human setting than e.g. in conventional surrogate approaches.

[0025] Second, the uses of the, preferably human, binding molecules (or bispecific single chain antibodies) as defined herein for the preparation of therapeutics in human is less cost- and labor-intensive than surrogate approaches.

[0026] Third, the, preferably human, binding molecules (or bispecific single chain antibodies) as defined herein can be used for preclinical testing not only in one primate species, but in a series of different primate species, thereby limiting the risk of potential species differences between primates and human.

[0027] Fourth, chimpanzee as an endangered species for animal testing is avoided.

[0028] Fifth, multiple blood samples can be extracted for extensive pharmacokinetic studies.

[0029] Sixth, due to the human origin of the, preferably human, binding molecules according to a preferred embodiment of the invention the generation of an immune reaction against said binding molecules is minimalized when administered to human patients. Induction of an immune response with antibodies specific for a drug candidate derived from a non-human species as e.g. a mouse leading to the development of human-anti-mouse antibodies (HAMAs) against therapeutic molecules of murine origin is excluded.

[0030] The term “protein” is well known in the art and describes biological compounds. Proteins comprise one or more amino acid chains (polypeptides), whereby the amino acids are bound among one another via a peptide bond. The term “polypeptide” as used herein describes a group of molecules, which consist of more than 30 amino acids. In accordance with the invention, the group of polypeptides comprises “proteins” as long as the proteins consist of a single polypeptide. Also in line with the definition the term “polypeptide” describes fragments of proteins as long as these fragments consist of more than 30 amino acids. Polypeptides may further form multimers such as dimers, trimers and higher oligomers, i.e. consisting of more than one polypeptide molecule. Polypeptide molecules forming such dimers, trimers etc. may be identical or non-identical. The corresponding higher order structures of such multimers are, consequently, termed homo- or heterodimers, homo- or heterotrimers etc. An example for a hereteromultimer is an antibody molecule, which, in its naturally occurring form, consists of two identical light polypeptide chains and two identical heavy polypeptide chains. The terms “polypeptide” and “protein” also refer to naturally modified polypeptides/proteins wherein the modification is effected e.g. by post-translational modifications like glycosylation, acetylation, phosphorylation and the like. Such modifications are well known in the art.

[0031] As used herein, “human” and “man” refers to the species Homo sapiens. As far as the medical uses of the constructs described herein are concerned, human patients are to be treated with the same molecule.

[0032] The term “human origin” as used in the context with the molecules of the invention describes molecules derivable from human libraries or having a structure/sequence corresponding to the human equivalent. Accordingly, proteins having an amino acid sequence corresponding to the analog human sequence, e.g. an antibody fragment having an amino acid sequences in the framework corresponding to the human germline sequences, are understood as molecules of human origin.

[0033] As used herein, a “non-chimpanzee primate” or “non-chimp primate” or grammatical variants thereof refers to any primate other than chimpanzee, i.e. other than an animal of belonging to the genus Pan, and including the species Pan paniscus and Pan troglodytes, also known as Anthropopithecus troglodytes or Simia satyrus. A “primate”, “primate species”, “primates” or grammatical variants thereof denote/s an order of eutherian mammals divided into the two suborders of prosimians and anthropoids and comprising man, apes, monkeys and lemurs. Specifically, “primates” as used herein comprises the suborder Strepsirrhini (non-tarsier prosimians), including the infraorder Lemuriformes (itself including the superfamilies Cheirogaleoidea and Lemuroidea), the infraorder Chiromyiformes (itself including the family Daubentoniidae) and the infraorder Lorisiformes (itself including the families Lorisidae and Galagidae). “Primates” as used herein also comprises the suborder Haplorrhini, including the infraorder Tarsiiformes (itself including the family Tarsiidae), the infraorder Simiiformes (itself including the Platyrrhini, or New-World monkeys, and the Catarrhini, including the Cercopithecidea, or Old-World Monkeys).

[0034] The non-chimpanzee primate species may be understood within the meaning of the invention to be a lemur, a tarsier, a gibbon, a marmoset (belonging to New-World Monkeys of the family Cebidae) or an Old-World Monkey (belonging to the superfamily Cercopithecoidea).

[0035] As used herein, an “Old-World Monkey” comprises any monkey falling in the superfamily Cercopithecoidea, itself subdivided into the families: the Cercopithecinae, which are mainly African but include the diverse genus of macaques which are Asian and North African; and the Colobinae, which include most of the Asian genera but also the African colobus monkeys.

[0036] Specifically, within the subfamily Cercopithecinae, an advantageous non-chimpanzee primate may be from the Tribe Cercopithecini, within the genus Allenopithecus (Allen's Swamp Monkey, Allenopithecus nigroviridis); within the genus Miopithecus (Angolan Talapoin, Miopithecus talapoin; Gabon Talapoin, Miopithecus ogouensis); within the genus Erythrocebus (Patas Monkey, Erythrocebus patas); within the genus Chlorocebus (Green Monkey, Chlorocebus sabaceus; Grivet, Chlorocebus aethiops; Bale Mountains Vervet, Chlorocebus djamdjamensis; Tantalus Monkey, Chlorocebus tantalus; Vervet Monkey, Chlorocebus pygerythrus; Malbrouck, Chlorocebus cynosuros); or within the genus Cercopithecus (Dryas Monkey or Salongo Monkey, Cercopithecus dryas; Diana Monkey, Cercopithecus diana; Roloway Monkey, Cercopithecus roloway; Greater Spot-nosed Monkey, Cercopithecus nictitans; Blue Monkey, Cercopithecus mitis; Silver Monkey, Cercopithecus doggetti; Golden Monkey, Cercopithecus kandti; Sykes's Monkey, Cercopithecus albogularis; Mona Monkey, Cercopithecus mona; Campbell's Mona Monkey, Cercopithecus campbelli; Lowe's Mona Monkey, Cercopithecus lowei; Crested Mona Monkey, Cercopithecus pogonias; Wolf's Mona Monkey, Cercopithecus wolfi; Dent's Mona Monkey, Cercopithecus denti; Lesser Spot-nosed Monkey, Cercopithecus petaurista; White-throated Guenon, Cercopithecus erythrogaster, Sclater's Guenon, Cercopithecus sclateri; Red-eared Guenon, Cercopithecus erythrotis; Moustached Guenon, Cercopithecus cephus; Red-tailed Monkey, Cercopithecus ascanius; L'Hoest's Monkey, Cercopithecus lhoesti; Preuss's Monkey, Cercopithecus preussi; Sun-tailed Monkey, Cercopithecus solatus; Hamlyn's Monkey or Owl-faced Monkey, Cercopithecus hamlyni; De Brazza's Monkey, Cercopithecus neglectus).

[0037] Alternatively, an advantageous non-chimpanzee primate, also within the subfamily Cercopithecinae but within the Tribe Papionini, may be from within the genus Macaca (Barbary Macaque, Macaca sylvanus; Lion-tailed Macaque, Macaca silenus; Southern Pig-tailed Macaque or Beruk, Macaca nemestrina; Northern Pig-tailed Macaque, Macaca leonina; Pagai Island Macaque or Bokkoi, Macaca pagensis; Siberut Macaque, Macaca siberu; Moor Macaque, Macaca maura; Booted Macaque, Macaca ochreata; Tonkean Macaque, Macaca tonkeana; Heck's Macaque, Macaca hecki; Gorontalo Macaque, Macaca nigriscens; Celebes Crested Macaque or Black “Ape”, Macaca nigra; Cynomolgus monkey or Crab-eating Macaque or Long-tailed Macaque or Kera, Macaca fascicularis; Stump-tailed Macaque or Bear Macaque, Macaca arctoides; Rhesus Macaque, Macaca mulatta; Formosan Rock Macaque, Macaca cyclopis; Japanese Macaque, Macaca fuscata; Toque Macaque, Macaca sinica; Bonnet Macaque, Macaca radiata; Barbary Macaque, Macaca sylvanmus; Assam Macaque, Macaca assamensis; Tibetan Macaque or Milne-Edwards' Macaque, Macaca thibetana; Arunachal Macaque or Munzala, Macaca munzala); within the genus Lophocebus (Gray-cheeked Mangabey, Lophocebus albigena; Lophocebus albigena albigena; Lophocebus albigena osmani; Lophocebus albigena johnstoni; Black Crested Mangabey, Lophocebus aterrimus; Opdenbosch's Mangabey, Lophocebus opdenboschi; Highland Mangabey, Lophocebus kipunji); within the genus Papio (Hamadryas Baboon, Papio hamadryas; Guinea Baboon, Papio papio; Olive Baboon, Papio anubis; Yellow Baboon, Papio cynocephalus; Chacma Baboon, Papio ursinus); within the genus Theropithecus (Gelada, Theropithecus gelada); within the genus Cercocebus (Sooty Mangabey, Cercocebus atys; Cercocebus atys atys; Cercocebus atys lunulatus; Collared Mangabey, Cercocebus torquatus; Agile Mangabey, Cercocebus agilis; Golden-bellied Mangabey, Cercocebus chrysogaster, Tana River Mangabey, Cercocebus galeritus; Sanje Mangabey, Cercocebus sanjei); or within the genus Mandrillus (Mandrill, Mandrillus sphinx; Drill, Mandrillus leucophaeus).

[0038] Most preferred is Macaca fascicularis (also known as Cynomolgus monkey and, therefore, in the Examples named “Cynomolgus”) and Macaca mulatta (rhesus monkey, named “rhesus”).

[0039] Within the subfamily Colobinae, an advantageous non-chimpanzee primate may be from the African group, within the genus Colobus (Black Colobus, Colobus satanas; Angola Colobus, Colobus angolensis; King Colobus, Colobus polykomos; Ursine Colobus, Colobus vellerosus; Mantled Guereza, Colobus guereza); within the genus Piliocolobus (Western Red Colobus, Piliocolobus badius; Piliocolobus badius badius; Piliocolobus badius temminckii; Piliocolobus badius waldronae; Pennant's Colobus, Piliocolobus pennantii; Piliocolobus pennantii pennantii; Piliocolobus pennantii epieni; Piliocolobus pennantii bouvieri; Preuss's Red Colobus, Piliocolobus preussi; Thollon's Red Colobus, Piliocolobus tholloni; Central African Red Colobus, Piliocolobus foai; Piliocolobus foai foai; Piliocolobus foai ellioti; Piliocolobus foai oustaleti; Piliocolobus foai semlikiensis; Piliocolobus foai parmentierorum; Ugandan Red Colobus, Piliocolobus tephrosceles; Uzyngwa Red Colobus, Piliocolobus gordonorum; Zanzibar Red Colobus, Piliocolobus kirkii; Tana River Red Colobus, Piliocolobus rufomitratus); or within the genus Procolobus (Olive Colobus, Procolobus verus).

[0040] Within the subfamily Colobinae, an advantageous non-chimpanzee primate may alternatively be from the Langur (leaf monkey) group, within the genus Semnopithecus (Nepal Gray Langur, Semnopithecus schistaceus; Kashmir Gray Langur, Semnopithecus ajax; Tarai Gray Langur, Semnopithecus hector, Northern Plains Gray Langur, Semnopithecus entellus; Black-footed Gray Langur, Semnopithecus hypoleucos; Southern Plains Gray Langur, Semnopithecus dussumieri; Tufted Gray Langur, Semnopithecus priam); within the T. vetulus group or the genus Trachypithecus (Purple-faced Langur, Trachypithecus vetulus; Nilgiri Langur, Trachypithecus johnii); within the T. cristatus group of the genus Trachypithecus (Javan Lutung, Trachypithecus auratus; Silvery Leaf Monkey or Silvery Lutung, Trachypithecus cristatus; Indochinese Lutung, Trachypithecus germaini; Tenasserim Lutung, Trachypithecus barbel); within the T. obscurus group of the genus Trachypithecus (Dusky Leaf Monkey or Spectacled Leaf Monkey, Trachypithecus obscurus; Phayre's Leaf Monkey, Trachypithecus phayrei); within the T. pileatus group of the genus Trachypithecus (Capped Langur, Trachypithecus pileatus; Shortridge's Langur, Trachypithecus shortridgei; Gee's Golden Langur, Trachypithecus geei); within the T. francoisi group of the genus Trachypithecus (Francois' Langur, Trachypithecus francoisi; Hatinh Langur, Trachypithecus hatinhensis; White-headed Langur, Trachypithecus poliocephalus; Laotian Langur, Trachypithecus laotum; Delacour's Langur, Trachypithecus delacouri; Indochinese Black Langur, Trachypithecus ebenus); or within the genus Presbytis (Sumatran Surili, Presbytis melalophos; Banded Surili, Presbytis femoralis; Sarawak Surili, Presbytis chrysomelas; White-thighed Surili, Presbytis siamensis; White-fronted Surili, Presbytis frontata; Javan Surili, Presbytis comata; Thomas's Langur, Presbytis thomasi; Hose's Langur, Presbytis hosei; Maroon Leaf Monkey, Presbytis rubicunda; Mentawai Langur or Joja, Presbytis potenziani; Natuna Island Surili, Presbytis natunae).

[0041] Within the subfamily Colobinae, an advantageous non-chimpanzee primate may alternatively be from the Odd-Nosed group, within the genus Pygathrix (Red-shanked Douc, Pygathrix nemaeus; Black-shanked Douc, Pygathrix nigripes; Gray-shanked Douc, Pygathrix cinerea); within the genus Rhinopithecus (Golden Snub-nosed Monkey, Rhinopithecus roxellana; Black Snub-nosed Monkey, Rhinopithecus bieti; Gray Snub-nosed Monkey, Rhinopithecus brelichi; Tonkin Snub-nosed Langur, Rhinopithecus avunculus); within the genus Nasalis (Proboscis Monkey, Nasalis larvatus); or within the genus Simias (Pig-tailed Langur, Simias concolor).

[0042] As used herein, the term “marmoset” denotes any New-World Monkeys of the genus Callithrix, for example belonging to the Atlantic marmosets of subgenus Callithrix (sic!) (Common Marmoset, Callithrix (Callithrix) jacchus; Black-tufted Marmoset, Callithrix (Callithrix) penicillata; Wied's Marmoset, Callithrix (Callithrix) kuhlii; White-headed Marmoset, Callithrix (Callithrix) geoffroyi; Buffy-headed Marmoset, Callithrix (Callithrix) flaviceps; Buffy-tufted Marmoset, Callithrix (Callithrix) aurita); belonging to the Amazonian marmosets of subgenus Mico (Rio Acari Marmoset, Callithrix (Mico) acariensis; Manicore Marmoset, Callithrix (Mico) manicorensis; Silvery Marmoset, Callithrix (Mico) argentata; White Marmoset, Callithrix (Mico) leucippe; Emilia's Marmoset, Callithrix (Mico) emiliae; Black-headed Marmoset, Callithrix (Mico) nigriceps; Marca's Marmoset, Callithrix (Mico)marcai; Black-tailed Marmoset, Callithrix (Mico) melanura; Santarem Marmoset, Callithrix (Mico) humeralifera; Maués Marmoset, Callithrix (Mico) mauesi; Gold-and-white Marmoset, Callithrix (Mico) chrysoleuca; Hershkovitz's Marmoset, Callithrix (Mico) intermedia; Satéré Marmoset, Callithrix (Mico) saterei); Roosmalens' Dwarf Marmoset belonging to the subgenus Callibella (Callithrix (Callibella) humilis); or the Pygmy Marmoset belonging to the subgenus Cebuella (Callithrix (Cebuella) pygmaea).

[0043] Other genera of the New-World Monkeys comprise tamarins of the genus Saguinus (comprising the S. oedipus-group, the S. midas group, the S. nigricollis group, the S. mystax group, the S. bicolor group and the S. inustus group) and squirrel monkeys of the genus Samiri (e.g. Saimiri sciureus, Saimiri oerstedii, Saimiri ustus, Saimiri boliviensis, Saimiri vanzolini)

[0044] The term “binding domain” characterizes in connection with the present invention a domain of a polypeptide which specifically binds/interacts with a given target structure/antigen/epitope. Thus, the binding domain is an “antigen-interaction-site”. The term “antigen-interaction-site” defines, in accordance with the present invention, a motif of a polypeptide, which is able to specifically interact with a specific antigen or a specific group of antigens, e.g. the identical antigen in different species. Said binding/interaction is also understood to define a “specific recognition”. The term “specifically recognizing” means in accordance with this invention that the antibody molecule is capable of specifically interacting with and/or binding to at least two, preferably at least three, more preferably at least four amino acids of an antigen, e.g. the human CD3 antigen as defined herein. Such binding may be exemplified by the specificity of a “lock-and-key-principle”. Thus, specific motifs in the amino acid sequence of the binding domain and the antigen bind to each other as a result of their primary, secondary or tertiary structure as well as the result of secondary modifications of said structure. The specific interaction of the antigen-interaction-site with its specific antigen may result as well in a simple binding of said site to the antigen. Moreover, the specific interaction of the antigen-interaction-site with its specific antigen may alternatively result in the initiation of a signal, e.g. due to the induction of a change of the conformation of the antigen, an oligomerization of the antigen, etc. A preferred example of a binding domain in line with the present invention is an antibody. The binding domain may be a monoclonal or polyclonal antibody or derived from a monoclonal or polyclonal antibody.

[0045] The term “antibody” comprises derivatives or functional fragments thereof which still retain the binding specificity. Techniques for the production of antibodies are well known in the art and described, e.g. in Harlow and Lane “Antibodies, A Laboratory Manual”, Cold Spring Harbor Laboratory Press, 1988 and Harlow and Lane “Using Antibodies: A Laboratory Manual” Cold Spring Harbor Laboratory Press, 1999. The term “antibody” also comprises immunoglobulins (Ig's) of different classes (i.e. IgA, IgG, IgM, IgD and IgE) and subclasses (such as IgG1, IgG2 etc.). These antibodies can be used, for example, for the immunoprecipitation, affinity purification and immunolocalization of the polypeptides or fusion proteins of the invention as well as for the monitoring of the presence and amount of such polypeptides, for example, in cultures of recombinant prokaryotes or eukaryotic cells or organisms.

[0046] The definition of the term “antibody” also includes embodiments such as chimeric, single chain and humanized antibodies, as well as antibody fragments, like, inter alia, Fab fragments. Antibody fragments or derivatives further comprise F(ab′)₂, Fv, scFv fragments or single domain antibodies, single variable domain antibodies or immunoglobulin single variable domain comprising merely one variable domain, which might be VH or VL, that specifically bind an antigen or epitope independently of other V regions or domains; see, for example, Harlow and Lane (1988) and (1999), loc. cit. Such immunoglobulin single variable domain encompasses not only an isolated antibody single variable domain polypeptide, but also larger polypeptides that comprise one or more monomers of an antibody single variable domain polypeptide sequence.

[0047] Various procedures are known in the art and may be used for the production of such antibodies and/or fragments. Thus, the (antibody) derivatives can be produced by peptidomimetics. Further, techniques described for the production of single chain antibodies (see, inter alia, U.S. Pat. No. 4,946,778) can be adapted to produce single chain antibodies specific for elected polypeptide(s). Also, transgenic animals may be used to express humanized antibodies specific for polypeptides and fusion proteins of this invention. For the preparation of monoclonal antibodies, any technique, providing antibodies produced by continuous cell line cultures can be used.

[0048] Examples for such techniques include the hybridoma technique (Köhler and Milstein Nature 256 (1975), 495-497), the trioma technique, the human B-cell hybridoma technique (Kozbor, Immunology Today 4 (1983), 72) and the EBV-hybridoma technique to produce human monoclonal antibodies (Cole et al., Monoclonal Antibodies and Cancer Therapy, Alan R. Liss, Inc. (1985), 77-96). Surface plasmon resonance as employed in the BlAcore system can be used to increase the efficiency of phage antibodies which bind to an epitope of a target polypeptide, such as CD3 epsilon (Schier, Human Antibodies Hybridomas 7 (1996), 97-105; Malmborg, J. Immunol. Methods 183 (1995), 7-13). It is also envisaged in the context of this invention that the term “antibody” comprises antibody constructs, which may be expressed in a host as described herein below, e.g. antibody constructs which may be transfected and/or transduced via, inter alia, viruses or plasmid vectors.

[0049] The term “specific interaction” as used in accordance with the present invention means that the binding (domain) molecule does not or does not significantly cross-react with polypeptides which have similar structure as those bound by the binding molecule, and which might be expressed by the same cells as the polypeptide of interest. Cross-reactivity of a panel of binding molecules under investigation may be tested, for example, by assessing binding of said panel of binding molecules under conventional conditions (see, e.g., Harlow and Lane, Antibodies: A Laboratory Manual, Cold Spring Harbor Laboratory Press, 1988 and Using Antibodies: A Laboratory Manual, Cold Spring Harbor Laboratory Press, 1999). Examples for the specific interaction of a binding domain with a specific antigen comprise the specificity of a ligand for its receptor. Said definition particularly comprises the interaction of ligands, which induce a signal upon binding to its specific receptor. Examples for said interaction, which is also particularly comprised by said definition, is the interaction of an antigenic determinant (epitope) with the binding domain (antigenic binding site) of an antibody.

[0050] The term “cross-species specificity” or “interspecies specificity” as used herein means binding of a binding domain described herein to the same target molecule in humans and non-chimpanzee primates. Thus, “cross-species specificity” or “interspecies specificity” is to be understood as an interspecies reactivity to the same molecule X expressed in different species, but not to a molecule other than X. Cross-species specificity of a monoclonal antibody recognizing e.g. human CD3 epsilon, to a non-chimpanzee primate CD3 epsilon, e.g. macaque CD3 epsilon, can be determined, for instance, by FACS analysis. The FACS analysis is carried out in a way that the respective monoclonal antibody is tested for binding to human and non-chimpanzee primate cells, e.g. macaque cells, expressing said human and non-chimpanzee primate CD3 epsilon antigens, respectively. An appropriate assay is shown in the following examples.

[0051] As used herein, CD3 epsilon denotes a molecule expressed as part of the T cell receptor and has the meaning as typically ascribed to it in the prior art. In human, it encompasses in individual or independently combined form all known CD3 subunits, for example CD3 epsilon, CD3 delta, CD3 gamma, CD3 zeta, CD3 alpha and CD3 beta. The non-chimpanzee primate CD3 antigens as referred to herein are, for example, Macaca fascicularis CD3 and Macaca mulatta CD3. In Macaca fascicularis, it encompasses CD3 epsilon FN-18 negative and CD3 epsilon FN-18 positive, CD3 gamma and CD3 delta. In Macaca mulatta, it encompasses CD3 epsilon, CD3 gamma and CD3 delta. Preferably, said CD3 as used herein is CD3 epsilon.

[0052] The human CD3 epsilon is indicated in GenBank Accession No. NM_{—}000733 and comprises SEQ ID NO. 1. The human CD3 gamma is indicated in GenBank Accession NO. NM_{—}000073. The human CD3 delta is indicated in GenBank Accession No. NM_{—}000732.

[0053] The CD3 epsilon “FN-18 negative” of Macaca fascicularis (i.e. CD3 epsilon not recognized by monoclonal antibody FN-18 due to a polymorphism as set forth above) is indicated in GenBank Accession No. AB073994.

[0054] The CD3 epsilon “FN-18 positive” of Macaca fascicularis (i.e. CD3 epsilon recognized by monoclonal antibody FN-18) is indicated in GenBank Accession No. AB073993. The CD3 gamma of Macaca fascicularis is indicated in GenBank Accession No. AB073992. The CD3 delta of Macaca fascicularis is indicated in GenBank Accession No. AB073991.

[0055] The nucleic acid sequences and amino acid sequences of the respective CD3 epsilon, gamma and delta homologs of Macaca mulatta can be identified and isolated by recombinant techniques described in the art (Sambrook et al. Molecular Cloning: A Laboratory Manual; Cold Spring Harbor Laboratory Press, 3^{rd} edition 2001). This applies mutatis mutandis to the CD3 epsilon, gamma and delta homologs of other non-chimpanzee primates as defined herein. The identification of the amino acid sequence of Callithrix jacchus, Saimiri sciureus and Saguinus oedipus is described in the appended examples. The amino acid sequence of the extracellular domain of the CD3 epsilon of Callithrix jacchus is depicted in SEQ ID NO: 3, the one of Saguinus oedipus is depicted in SEQ ID NO: 5 and the one of Saimiri sciureus is depicted in SEQ ID NO: 7.

[0056] In line with the above the term “epitope” defines an antigenic determinant, which is specifically bound/identified by a binding molecule as defined above. The binding domain or molecules may specifically bind to/interact with conformational or continuous epitopes, which are unique for the target structure, e.g. the human and non-chimpanzee primate CD3 epsilon chain. A conformational or discontinuous epitope is characterized for polypeptide antigens by the presence of two or more discrete amino acid residues which are separated in the primary sequence, but come together on the surface of the molecule when the polypeptide folds into the native protein/antigen (Sela, (1969) Science 166, 1365 and Laver, (1990) Cell 61, 553-6). The two or more discrete amino acid residues contributing to the epitope are present on separate sections of one or more polypeptide chain(s). These residues come together on the surface of the molecule when the polypeptide chain(s) fold(s) into a three-dimensional structure to constitute the epitope. In contrast, a continuous or linear epitope consists of two or more discrete amino acid residues, which are present in a single linear segment of a polypeptide chain. Within the present invention, a “context-dependent” CD3 epitope refers to the conformation of said epitope. Such a context-dependent epitope, localized on the epsilon chain of CD3, can only develop its correct conformation if it is embedded within the rest of the epsilon chain and held in the right position by heterodimerization of the epsilon chain with either CD3 gamma or delta chain. In contrast, a context-independent CD3 epitope as provided herein refers to an N-terminal 1-27 amino acid residue polypeptide or a functional fragment thereof of CD3 epsilon. This N-terminal 1-27 amino acid residue polypeptide or a functional fragment thereof maintains its three-dimensional structural integrity and correct conformation when taken out of its native environment in the CD3 complex. The context-independency of the N-terminal 1-27 amino acid residue polypeptide or a functional fragment thereof, which is part of the extracellular domain of CD3 epsilon, represents, thus, an epitope which is completely different to the epitopes of CD3 epsilon described in connection with a method for the preparation of human binding molecules in WO 2004/106380. Said method used solely expressed recombinant CD3 epsilon. The conformation of this solely expressed recombinant CD3 epsilon differed from that adopted in its natural form, that is, the form in which the CD3 epsilon subunit of the TCR/CD3 complex exists as part of a noncovalent complex with either the CD3 delta or the CD3-gamma subunit of the TCR/CD3 complex. When such solely expressed recombinant CD3 epsilon protein is used as an antigen for selection of antibodies from an antibody library, antibodies specific for this antigen are identified from the library although such a library does not contain antibodies with specificity for self-antigens/autoantigens. This is due to the fact that solely expressed recombinant CD3 epsilon protein does not exist in vivo; it is not an autoantigen. Consequently, subpopulations of B cells expressing antibodies specific for this protein have not been depleted in vivo; an antibody library constructed from such B cells would contain genetic material for antibodies specific for solely expressed recombinant CD3 epsilon protein.

[0057] However, since the context-independent N-terminal 1-27 amino acid residue polypeptide or a functional fragment thereof is an epitope, which folds in its native form, binding domains in line with the present invention cannot be identified by methods based on the approach described in WO 04/106380. Therefore, it could be verified in tests that binding molecules as disclosed in WO 2004/106380 are not capable of binding to the N-terminal 1-27 amino acid residues of the CD3 epsilon chain. Hence, conventional anti-CD3 binding molecules or anti-CD3 antibody molecules (e.g. as disclosed in WO 99/54440) bind CD3 epsilon chain at a position which is more C-terminally located than the context-independent N-terminal 1-27 amino acid residue polypeptide or a functional fragment provided herein. Prior art antibody molecules OKT3 and UCHT-1 have also a specificity for the epsilon-subunit of the TCR/CD3 complex between amino acid residues 35 to 85 and, accordingly, the epitope of these antibodies is also more C-terminally located. In addition, UCHT-1 binds to the CD3 epsilon chain in a region between amino acid residues 43 to 77 (Tunnacliffe, Int. Immunol. 1 (1989), 546-50; Kjer-Nielsen, PNAS 101, (2004), 7675-7680; Salmeron, J. Immunol. 147 (1991), 3047-52). Therefore, prior art anti-CD3 molecules do not bind to and are not directed against the herein defined context-independent N-terminal 1-27 amino acid residue epitope (or a functional fragment thereof).

[0058] For the generation of a, preferably human, binding domain comprised in a polypeptide of the invention, e.g. in a bispecific single chain antibody as defined herein, e.g. monoclonal antibodies binding to both the human and non-chimpanzee primate CD3 epsilon (e.g. macaque CD3 epsilon) can be used.

[0059] In a preferred embodiment of the polypeptide of the invention, the non-chimpanzee primate is an old world monkey. In a more preferred embodiment of the polypeptide, the old world monkey is a monkey of the Papio genus Macaque genus. Most preferably, the monkey of the Macaque genus is Assamese macaque (Macaca assamensis), Barbary macaque (Macaca sylvanus), Bonnet macaque (Macaca radiata), Booted or Sulawesi-Booted macaque (Macaca ochreata), Sulawesi-crested macaque (Macaca nigra), Formosan rock macaque (Macaca cyclopsis), Japanese snow macaque or Japanese macaque (Macaca fuscata), Cynomologus monkey or crab-eating macaque or long-tailed macaque or Java macaque (Macaca fascicularis), Lion-tailed macaque (Macaca silenus), Pigtailed macaque (Macaca nemestrina), Rhesus macaque (Macaca mulatta), Tibetan macaque (Macaca thibetana), Tonkean macaque (Macaca tonkeana), Toque macaque (Macaca sinica), Stump-tailed macaque or Red-faced macaque or Bear monkey (Macaca arctoides), or Moor macaque (Macaca maurus). Most preferably, the monkey of the Papio genus is Hamadryas Baboon, Papio hamadryas; Guinea Baboon, Papio papio; Olive Baboon, Papio anubis; Yellow Baboon, Papio cynocephalus; Chacma Baboon, Papio ursinus

[0060] In an alternatively preferred embodiment of the polypeptide of the invention, the non-chimpanzee primate is a new world monkey. In a more preferred embodiment of the polypeptide, the new world monkey is a monkey of the Callithrix genus (marmoset), the Saguinus genus or the Samiri genus. Most preferably, the monkey of the Callithrix genus is Callithrix jacchus, the monkey of the Saguinus genus is Saguinus oedipus and the monkey of the Samiri genus is Saimiri sciureus.

[0061] As described herein above the polypeptide of the invention binds with the first binding domain to an epitope of human and non-chimpanzee primate CD3ε (epsilon) chain, wherein the epitope is part of an amino acid sequence comprised in the group consisting of 27 amino acid residues as depicted in SEQ ID NOs. 2, 4, 6, or 8 or a functional fragment thereof.

[0062] In line with the present invention it is preferred for the polypeptide of the invention that said epitope is part of an amino acid sequence comprising 26, 25, 24, 23, 22, 21, 20, 19, 18, 17, 16, 15, 14, 13, 12, 11, 10, 9, 8, 7, 6 or 5 amino acids.

[0063] More preferably, wherein said epitope comprises at least the amino acid sequence

[0064] Gln-Asp-Gly-Asn-Glu (Q-D-G-N-E-D).

[0065] Within the present invention, a functional fragment of the N-terminal 1-27 amino acid residues means that said functional fragment is still a context-independent epitope maintaining its three-dimensional structural integrity when taken out of its native environment in the CD3 complex (and fused to a heterologous amino acid sequence such as EpCAM or an immunoglobulin Fc part, e.g. as shown in Example 3.1). The maintenance of the three-dimensional structure within the 27 amino acid N-terminal polypeptide or functional fragment thereof of CD3 epsilon can be used for the generation of binding domains which bind to the N-terminal CD3 epsilon polypeptide fragment in vitro and to the native (CD3 epsilon subunit of the) CD3 complex on T cells in vivo with the same binding affinity. Within the present invention, a functional fragment of the N-terminal 1-27 amino acid residues means that CD3 binding molecules provided herein can still bind to such functional fragments in a context-independent manner. The person skilled in the art is aware of methods for epitope mapping to determine which amino acid residues of an epitope are recognized by such anti-CD3 binding molecules (e.g. alanine scanning).

[0066] In a preferred embodiment of the invention, the polypeptide of the invention comprises a (first) binding domain capable of binding to an epitope of human and non-chimpanzee primate CD3c chain and a second binding domain capable of binding to a cell surface antigen.

[0067] The term “cell surface antigen” as used herein denotes a molecule, which is displayed on the surface of a cell. In most cases, this molecule will be located in or on the plasma membrane of the cell such that at least part of this molecule remains accessible from outside the cell in tertiary form. A non-limiting example of a cell surface molecule, which is located in the plasma membrane is a transmembrane protein comprising, in its tertiary conformation, regions of hydrophilicity and hydrophobicity. Here, at least one hydrophobic region allows the cell surface molecule to be embedded, or inserted in the hydrophobic plasma membrane of the cell while the hydrophilic regions extend on either side of the plasma membrane into the cytoplasm and extracellular space, respectively. Non-limiting examples of cell surface molecules which are located on the plasma membrane are proteins which have been modified at a cysteine residue to bear a palmitoyl group, proteins modified at a C-terminal cysteine residue to bear a farnesyl group or proteins which have been modified at the C-terminus to bear a glycosyl phosphatidyl inositol (“GPI”) anchor. These groups allow covalent attachment of proteins to the outer surface of the plasma membrane, where they remain accessible for recognition by extracellular molecules such as antibodies. Examples of cell surface antigens include EGFR, EGFRvIII, MCSP, Carbonic anhydrase IX (CAIX), CD30, CD33, Her2/neu, IgE, CD44v6 and Muc-1. Additionally, examples for corresponding cell surface antibodies comprise antigens which are characteristic for a specific disease or ailment, i.e. cancer, autoimmune diseases or infections diseases including viral infections. Accordingly, the term “cell surface antigens” explicitly includes viral proteins such as native, unprocessed viral proteins exposed on the surface of infected cells (described inter alia for envelope proteins of Hepatitis virus B, C and HIV-1).

[0068] One defense function of cytotoxic T cells is the destruction of virus-infected cells, therefore, the unique property of the bispecific binding molecules of the invention to activate and redirect cytotoxic T cells irrespecitve of their autochthonous specificity has a great impact on the broad field of chronic virus infections. For the majority of these infections elimination of persistently infected cells is the only chance for cure. Adoptive T cell therapies are currently being developed against chronic CMV and EBV infections (Rooney, C. M., et al., Use of gene-modified virus-specific T lymphocytes to control Epstein-Barr-virus-related lymphoproliferation. Lancet, 1995. 345 (8941): p. 9-13; Walter, E. A., et al., Reconstitution of cellular immunity against cytomegalovirus in recipients of allogeneic bone marrow by transfer of T-cell clones from the donor. N Engl J Med, 1995. 333 (16): p. 1038-44).

[0069] Chronic hepatitis B infection is clearly one of the most interesting and rewarding indications. Worldwide between 350 and 400 million people are infected with HBV. Current treatment of chronic HBV hepatitis rests on interferon gamma and nucleosid or nucleotide analogues, a long term therapy with considerable side-effects such as induction of hepatitis flares, fever, myalgias, thrombocytopenia and depression. Although there are now more than 4 approved therapeutic regimens, elimination of the virus is rarely achieved. A persistent inflammation in chronic hepatitis B leads to liver cirrhosis and hepatocellular carcinoma in more than 25% of patients. Moreover, up to 40% of patients with chronic hepatitis B will will die from serious complications, accounting for 0.6 to 1.0 million deaths per year worldwide

[0070] HBV, the prototype of the Hepadnaviruses is an enveloped virus whose relaxed circular (rc) genome is reverse transcribed into an RNA pregenome. After infection the rc DNA is imported into the hepatocyte nucleus where it is completed to a covalently closed circular DNA (cccDNA) containing four overlapping reading frames. It serves as transcription template for the pregenomic RNA and three subgenomic RNAs. The RNA pregenome functions as mRNA for translation of the viral core and polymerase protein. Infected cells produce continuously HBV surface protein (HBsAg) from the cccDNA even when HBV replication is stopped. HBsAg consists of the small surface (S) proteins with very few portions of middle and large (L) surface proteins. Both the HBV S and L are targeted to the Endoplasmatic Reticulum (ER) membrane from where they are transported in membrane vesicles via the trans golgi organelle to the plasma membrane (Gorelick, F. S. and C. Shugrue, Exiting the endoplasmic reticulum. Mol Cell Endocrinol, 2001. 177 (1-2): p. 13-8). S and L proteins are permanently expressed on the surface of HBV replicating hepatocytes as shown recently (Chu, C. M. and Y. F. Liaw, Membrane staining for hepatitis B surface antigen on hepatocytes: a sensitive and specific marker of active viral replication in hepatitis B. J Clin Pathol, 1995. 48(5): p. 470-3).

[0071] Prototype viruses that expose envelope proteins at the cell surface are Hepatitis virus

[0072] B (HBV), Hepatitis virus C (HCV) and HIV-1 both of which represent an enormous burden of disease globally. For the HIV-1 virus indication, it has recently been shown that T cells modified by a chimeric TCR with an Fv antibody construct directed at the gp120 envelope protein can kill HIV-1 infected target cells (Masiero, S., et al., T-cell engineering by a chimeric T-cell receptor with antibody-type specificity for the HIV-1 gp120. Gene Ther, 2005. 12 (4): p. 299-310). Of the hepadna viruses, hepatitis virus B (HBV) expresses the envelope protein complex HBsAg which is continuously produced from episomal cccDNA even when HBV replication subsides.

[0073] The expression as intact S and L HBV proteins on the cell surface makes them accessible for antibodies which are the hallmark of seroconversion when patients recover from the acute phase of infections and change from circulating HBsAg to antiHBs. If seroconversion does not occur, up to 30% of hepatocytes continue to express HBV S protein also after highly active antiviral therapy of long duration. Thus beyond T lymphocytes recognizing specifically intracellularly processed HBV peptides and presented by MHC molecules at the cell surface other forms of T cell engagement are feasible aimed at intact surface protein such as S and L antigens accessible in the outer cell membrane. Using single chain antibody fragments recognizing hepatitis B virus small (S) and large (L) envelope proteins, artificial T-cell receptors have been generated which allow directing grafted T-cells to infected hepatocytes and upon antigen contact activation of these T-cells to secrete cytokines and kill infected hepatocytes.

[0074] The limitation of this approach is, (i) that T-cells need to be manipulated in vitro, (ii) retroviruses used to transfer the T-cell receptors may cause insertional mutagenesis in the T-cells, and (iii) that once T-cells have been transferred the cytotoxic response cannot be limited.

[0075] To overcome these limitations, bispecific single chain antibody molecules comprising a first domain with a binding specificity for the human and the non-chimpanzee primate CD3 epsilon antigen (as provided herein in context of this invention) as well as a second domain with a binding specificity for HBV or HCV envelope proteins of infected hepatocytes may be generated and are within the scope of this invention.

[0076] Within the present invention it is further preferred that the second binding domain binds to a cell surface antigen of a human and/or a non-chimpanzee primate.

[0077] For the generation of the second binding domain of the polypeptide of the invention, e.g. bispecific single chain antibodies as defined herein, monoclonal antibodies binding to both of the respective human and/or non-chimpanzee primate cell surface antigens can be utilized. Appropriate binding domains for the bispecific polypeptide as defined herein e.g. can be derived from cross-species specific monoclonal antibodies by recombinant methods described in the art. A monoclonal antibody binding to a human cell surface antigen and to the homolog of said cell surface antigen in a non-chimpanzee primate can be tested by FACS assays as set forth above. It is evident to those skilled in the art that cross-species specific antibodies can also be generated by hybridoma techniques described in the literature (Milstein and Köhler, Nature 256 (1975), 495-7). For example, mice may be alternately immunized with human and non-chimpanzee primate CD33. From these mice, cross-species specific antibody-producing hybridoma cells are isolated via hybridoma technology and analysed by FACS as set forth above. The generation and analysis of bispecific polypeptides such as bispecific single chain antibodies exhibiting cross-species specificity as described herein is shown in the following examples. The advantages of the bispecific single chain antibodies exhibiting cross-species specificity include the points enumerated below.

[0078] It is particularly preferred for the polypeptide of the invention that the first binding domain capable of binding to an epitope of human and non-chimpanzee primate CD3ε chain comprises a VL region comprising CDR-L1, CDR-L2 and CDR-L3 selected from:
[0079] (a) CDR-L1 as depicted in SEQ ID NO. 27, CDR-L2 as depicted in SEQ ID NO. 28 and CDR-L3 as depicted in SEQ ID NO. 29;
[0080] (b) CDR-L1 as depicted in SEQ ID NO. 117, CDR-L2 as depicted in SEQ ID NO. 118 and CDR-L3 as depicted in SEQ ID NO. 119; and
[0081] (c) CDR-L1 as depicted in SEQ ID NO. 153, CDR-L2 as depicted in SEQ ID NO. 154 and CDR-L3 as depicted in SEQ ID NO. 155.

[0082] The variable regions, i.e. the variable light chain (“L” or “VL”) and the variable heavy chain (“H” or “VH”) are understood in the art to provide the binding domain of an antibody. This variable regions harbor the complementary determining regions.

[0083] The term “complementary determining region” (CDR) is well known in the art to dictate the antigen specificity of an antibody. The term “CDR-L” or “L CDR” refers to CDRs in the VL, whereas the term “CDR-H” or “H CDR” refers to the CDRs in the VH

[0084] In an alternatively preferred embodiment of the polypeptide of the invention the first binding domain capable of binding to an epitope of human and non-chimpanzee primate CD3E chain comprises a VH region comprising CDR-H 1, CDR-H2 and CDR-H3 selected from:
[0085] (a) CDR-H1 as depicted in SEQ ID NO. 12, CDR-H2 as depicted in SEQ ID NO. 13 and CDR-H3 as depicted in SEQ ID NO. 14;
[0086] (b) CDR-H1 as depicted in SEQ ID NO. 30, CDR-H2 as depicted in SEQ ID NO. 31 and CDR-H3 as depicted in SEQ ID NO. 32;
[0087] (c) CDR-H1 as depicted in SEQ ID NO. 48, CDR-H2 as depicted in SEQ ID NO. 49 and CDR-H3 as depicted in SEQ ID NO. 50;
[0088] (d) CDR-H1 as depicted in SEQ ID NO. 66, CDR-H2 as depicted in SEQ ID NO. 67 and CDR-H3 as depicted in SEQ ID NO. 68;
[0089] (e) CDR-H1 as depicted in SEQ ID NO. 84, CDR-H2 as depicted in SEQ ID NO. 85 and CDR-H3 as depicted in SEQ ID NO. 86;
[0090] (f) CDR-H1 as depicted in SEQ ID NO. 102, CDR-H2 as depicted in SEQ ID NO. 103 and CDR-H3 as depicted in SEQ ID NO. 104;
[0091] (g) CDR-H1 as depicted in SEQ ID NO. 120, CDR-H2 as depicted in SEQ ID NO. 121 and CDR-H3 as depicted in SEQ ID NO. 122;
[0092] (h) CDR-H1 as depicted in SEQ ID NO. 138, CDR-H2 as depicted in SEQ ID NO. 139 and CDR-H3 as depicted in SEQ ID NO. 140;
[0093] (i) CDR-H1 as depicted in SEQ ID NO. 156, CDR-H2 as depicted in SEQ ID NO. 157 and CDR-H3 as depicted in SEQ ID NO. 158; and
[0094] (j) CDR-H1 as depicted in SEQ ID NO. 174, CDR-H2 as depicted in SEQ ID NO. 175 and CDR-H3 as depicted in SEQ ID NO. 176.

[0095] It is further preferred that the binding domain capable of binding to an epitope of human and non-chimpanzee primate CD3ε chain comprises a VL region selected from the group consisting of a VL region as depicted in SEQ ID NO. 35, 39, 125, 129, 161 or 165.

[0096] It is alternatively preferred that the first binding domain capable of binding to an epitope of human and non-chimpanzee primate CD3c chain comprises a VH region selected from the group consisting of a VH region as depicted in SEQ ID NO. 15, 19, 33, 37, 51, 55, 69, 73, 87, 91, 105, 109, 123, 127, 141, 145, 159, 163, 177 or 181.

[0097] More preferably, the polypeptide of the invention is characterized by the first binding domain capable of binding to an epitope of human and non-chimpanzee primate CD3ε chain, which comprises a VL region and a VH region selected from the group consisting of:
[0098] (a) a VL region as depicted in SEQ ID NO. 17 or 21 and a VH region as depicted in SEQ ID NO. 15 or 19;
[0099] (b) a VL region as depicted in SEQ ID NO. 35 or 39 and a VH region as depicted in SEQ ID NO. 33 or 37;
[0100] (c) a VL region as depicted in SEQ ID NO. 53 or 57 and a VH region as depicted in SEQ ID NO. 51 or 55;
[0101] (d) a VL region as depicted in SEQ ID NO. 71 or 75 and a VH region as depicted in SEQ ID NO. 69 or 73;
[0102] (e) a VL region as depicted in SEQ ID NO. 89 or 93 and a VH region as depicted in SEQ ID NO. 87 or 91;
[0103] (f) a VL region as depicted in SEQ ID NO. 107 or 111 and a VH region as depicted in SEQ ID NO. 105 or 109;
[0104] (g) a VL region as depicted in SEQ ID NO. 125 or 129 and a VH region as depicted in SEQ ID NO. 123 or 127;
[0105] (h) a VL region as depicted in SEQ ID NO. 143 or 147 and a VH region as depicted in SEQ ID NO. 141 or 145;
[0106] (i) a VL region as depicted in SEQ ID NO. 161 or 165 and a VH region as depicted in SEQ ID NO. 159 or 163; and
[0107] (j) a VL region as depicted in SEQ ID NO. 179 or 183 and a VH region as depicted in SEQ ID NO. 177 or 181.

[0108] According to a preferred embodiment of the polypeptide of the invention the pairs of VH-regions and VL-regions are in the format of a single chain antibody (scFv). The VH and VL regions are arranged in the order VH-VL or VL-VH. It is preferred that the VH-region is positioned N-terminally to a linker sequence. The VL-region is positioned C-terminally of the linker sequence.

[0109] A preferred embodiment of the above described polypeptide of the invention is characterized by the first binding domain capable of binding to an epitope of human and non-chimpanzee primate CD3ε chain comprising an amino acid sequence selected from the group consisting of SEQ ID NOs: 23, 25, 41, 43, 59, 61, 77, 79, 95, 97, 113, 115, 131, 133, 149, 151, 167, 169, 185 or 187.

[0110] The invention further relates to an above described polypeptide, wherein the second binding domain binds to a cell surface antigen, which is preferably a tumor antigen.

[0111] The term “tumor antigen” as used herein may be understood as those antigens that are presented on tumor cells. These antigens can be presented on the cell surface with an extracellular part, which is often combined with a transmembrane and cytoplasmic part of the molecule. These antigens can sometimes be presented only by tumor cells and never by the normal ones. Tumor antigens can be exclusively expressed on tumor cells or might represent a tumor specific mutation compared to normal cells. In this case, they are called tumor-specific antigens. More common are antigens that are presented by tumor cells and normal cells, and they are called tumor-associated antigens. These tumor-associated antigens can be overexpressed compared to normal cells or are accessible for antibody binding in tumor cells due to the less compact structure of the tumor tissue compared to normal tissue. Non-limiting examples of tumor antigens as used herein are EGFR (Liu, Br. J. Cancer 82/12 (2000), 1991-1999; Bonner, Semin. Radiat. Oncol. 12 (2002), 11-20; Kiyota, Oncology 63/1 (2002), 92-98; Kuan, Brain Tumor Pathol. 17/2 (2000), 71-78), EGFRvIII (Kuan, Brain Tumor Pathol. 17/2 (2000), 71-78), Carboanhydrase IX (MN/CA IX) (Uemura, Br. J. Cancer 81/4 (1999), 741-746; Longcaster, Cancer Res. 61/17 (2001), 6394-6399; Chia, J. Clin. Oncol. 19/16 (2001), 3660-3668; Beasley, Cancer Res. 61/13 (2001), 5262-5267), CD33 (Abutalib, Curr Pharm Biotechnol. 7 (2006), 343-69), MCSP (Campoli, Crit Rev Immunol. 24 (2004), 267-96), or IgE (Infuhr, Allergy 60 (2005), 977-85).

[0112] It is preferred that the tumor antigen is selected from EGFR, EGFRvIII, MCSP, EpCAM, Carbonic anhydrase IX (CAIX), CD30, CD33, Her2/neu, CD44v6 and Muc-1.

[0113] EGFR (also known as c-erbl or HER1) belongs to the erbB receptor tyrosine kinase family. When activated by binding of a ligand from the EGF family of growth factors, EGFR homodimerizes or heterodimerizes with a second EGFR or another member of the erbB receptor family, respectively, initiating a signaling cascade through mitogen-activated protein kinases and other transcription factors leading to proliferation, differentiation and repair (Olayioye, EMBO J. 19 (2000), 3159-67). EGFR is overexpressed in many epithelial cancers, including colorectal, breast, lung, and head and neck cancers (Mendelsohn, J. Clin. Oncol. 21 (2003), 2787-99; Mendelsohn, J. Clin. Oncol. 20 (18, Suppl.) (2002), 1S-13S; Prewett, Clin. Cancer Res. 8 (2002), 994-1003). Overexpression and/or mutation of EGFR in malignant cells leads to constitutive activation of kinase activity resulting in proliferation, angiogenesis, invasion, metastasis, and inhibition of apoptosis (Mendelsohn (2003, loc. cit.; Ciardiello, Clin. Cancer Res. 7 (2001), 2958-70; Perez-Soler, Oncologist 9 (2004), 58-67). Monoclonal antibodies that target the extracellular ligand binding domain or the intracellular tyrosine kinase signaling cascade of EGFR have been shown efficacy as antitumor target (Laskin, Cancer Treat. Review 30 (2004), 1-17). For example, cetuximab (Erbitux) a humanized monoclonal antibody to EGFR, which competitively inhibits the extracellular domain of EGFR to inhibit ligand activation of the receptor, was approved by the Food and Drug Administration (FDA) in 2004 for the treatment of metastatic colon cancer in combination with the topoisomerase inhibitor irinotecan.

[0114] Melanoma-associated cell surface chondroitin sulphate proteoglycane (MCSP), also known as high-molecular weight melanoma-associated antigen (HMW-MAA) or melanoma-associated proteoglycan is a large cell surface proteoglycan of more than 450 kDa comprising a 250 kDa glycoprotein core and glycosaminoglycan chains attached to it (Pluschke, PNAS 93 (1996), 9710; Nishiyama, J. Cell Biol. 114 (1991), 359). The exact function of MCSP is still unknown. It may act as adhesion receptor that mediate cellular interactions with the extracellular matrix (ECM) and are probably implicated in angiogenesis, tissue invasion and cell spreading (Burg, Cancer Res. 59 (1999), 2869; lida, J. Biol. Chem. 276 (2001), 18786; Eisenmann, Nat. Cell Biol. 1 (1999), 507; lida, Cancer Res. 55 (1995), 2177; Campoli (2004), loc. cit). MCSP can enhance ligand binding by a4b1 integrin, and MCSP activation can enhance integrin-mediated cell spreading by cdc42- and p130cas-dependent mechanisms. MCSP associates through chondroitin sulphate with MT3-MMP, which can degrade various ECM-proteins. It may specifically localize MT3-MMP to cellular ECM-adhesion sites. Thus, both molecules seem to be required for invasion of type I collagen and degradation of type I gelatine (lida (2001), loc. cit.). MSCP is a major marker for melanoma, where it is highly expressed on the surface of the tumor cells. It is expressed by at least 90% of melanoma lesions (Natali, J. Natl. Cancer Inst. 72 (1984), 13). Among all melanoma associated antigens, MCSP displays the lowest degree of heterogeneity (Natali, Cancer Res. 45 (1985), 2883). In contrast to the primary tumors of superficial spreading melanoma (frequency: 60%), nodular melanoma (frequency: 20%) and lentigo maligna melanoma (frequency: 10%), which are usually MCSP-positive (Reza Ziai 1987 Cancer Res. 47: 2474), primary tumors of acral lentiginous melanoma (frequency: 5%) are frequently MCSP-negative (Kageshita, Cancer Res. 51 (1991), 1726). Currently, there are 53.600 newly diagnosed cases of melanoma each year in the U.S. (2002). Overall the incidence of melanoma is increasing.

[0115] In a preferred embodiment of the invention the polypeptide is a bispecific single chain antibody molecule.

[0116] The herein above described problems with regard to the development of surrogate molecules for preclinical studies is further aggravated, if the drug candidate is a bispecific antibody, e.g. a bispecific single chain antibody. Such a bispecific antibody requires that both antigens recognized are cross-species specific with a given animal species to allow for safety testing in such animal.

[0117] As also noted herein above, the present invention provides polypeptides comprising a first binding domain capable of binding to an epitope of human and non-chimpanzee primate CD3ε chain and a second binding domain capable of binding to a cell surface antigen, wherein the second binding domain preferably also binds to a cell surface antigen of a human and a non-chimpanzee primate. The advantage of bispecific single chain antibody molecules as drug candidates fulfilling the requirements of the preferred polypeptide of the invention is the use of such molecules in preclinical animal testing as well as in clinical studies and even for therapy in human. In a preferred embodiment of the cross-species specific bispecific single chain antibodies of the invention the second binding domain binding to a cell surface antigen is of human origin. In a cross-species specific bispecific molecule according to the invention the binding domain binding to an epitope of human and non-chimpanzee primate CD3 epsilon chain is located in the order VH-VL or VL-VH at the N-terminus or the C-terminus of the bispecific molecule. Examples for cross-species specific bispecific molecules according to the invention in different arrangements of the VH- and the VL-chain in the first and the second binding domain are described in the appended examples.

[0118] As used herein, a “bispecific single chain antibody” denotes a single polypeptide chain comprising two binding domains. Each binding domain comprises one variable region from an antibody heavy chain (“VH region”), wherein the VH region of the first binding domain specifically binds to the CD3ε molecule, and the VH region of the second binding domain specifically binds to a cell surface antigen, as defined in more detail below. The two binding domains are optionally linked to one another by a short polypeptide spacer. A non-limiting example for a polypeptide spacer is Gly-Gly-Gly-Gly-Ser (G-G-G-G-S) and repeats thereof. Each binding domain may additionally comprise one variable region from an antibody light chain (“VL region”), the VH region and VL region within each of the first and second binding domains being linked to one another via a polypeptide linker, for example of the type disclosed and claimed in EP 623679 B1, but in any case long enough to allow the VH region and VL region of the first binding domain and the VH region and VL region of the second binding domain to pair with one another such that, together, they are able to specifically bind to the respective first and second molecules.

[0119] According to a preferred embodiment of the invention an above characterized bispecific single chain antibody molecule comprises a group of the following sequences as CDR H1, CDR H2, CDR H3, CDR L1, CDR L2 and CDR L3 in the second binding domain selected from the group consisting of:

[0120] SEQ ID NOs: 189-194, SEQ ID NOs: 201-206, SEQ ID NOs: 219-224, SEQ ID NOs: 237-242, SEQ ID NOs:255-260, SEQ ID NOs:273-279, SEQ ID NOs: 382-384 and 387-389, SEQ ID NOs: 400-402 and 405-407, SEQ ID NOs: 418-420 and 423-425, SEQ ID NOs: 436-438 and 441-443, SEQ ID NOs: 454-456 and 459-461, SEQ ID NOs: 472-474 and 477-479, SEQ ID NOs: 490-492 and 495-497, SEQ ID NOs: and 508-510 and 513-515,

[0121] SEQ ID NOs: 530-532 and 1568 to 1570, SEQ ID NOs: 545-547 and 550-552, SEQ ID NOs: 559-561 and 564-566,

[0122] SEQ ID NOs: 577-579 and 582-584,

[0123] SEQ ID NOs: 615-617 and 620-622, SEQ ID NOs: 633-635, 638, 639 and 1571, SEQ ID NOs: 650-652 and 655-657, SEQ ID NOs: 668-670 and 673-675, SEQ ID NOs: 682-684 and 687-689, SEQ ID NOs: 696-698 and 701-703, SEQ ID NOs: 710-712 and 715-717, SEQ ID NOs: 724-726 and 729-731, SEQ ID NOs: 738-740 and 743-745, SEQ ID NOs: 752-754 and 757-759, SEQ ID NOs: 766-768 and 771-773, SEQ ID NOs: 780-782 and 785-787, SEQ ID NOs: 794-796 and 799-801, SEQ ID NOs: 808-810 and 813-815, SEQ ID NOs: 822-824 and 827-829, SEQ ID NOs: 836-838 and 841-843, SEQ ID NOs: 850-852 and 855-857,

[0124] SEQ ID NOs: 866-868 and 871-873, SEQ ID NOs: 884-886 and 889-891, SEQ ID NOs: 902-904 and 907-909, SEQ ID NOs: 920-922 and 925-927, SEQ ID NOs: 938-940 and 943-945, SEQ ID NOs: 956-958 and 961-963, SEQ ID NOs: 974-976 and 979-981, SEQ ID NOs: 992-994 and 997-999, SEQ ID NOs: 1006-1008 and 1011-1013, SEQ ID NOs: 1020-1022 and 1025-1027, SEQ ID NOs: 1034-1036 and 1039-1041, SEQ ID NOs: 1048-1050 and 1053-1055, SEQ ID NOs: 1062-1064 and 1067-1069, SEQ ID NOs: 1076-1078 and 1081-1083, SEQ ID NOs: 1090-1092 and 1095-1097,

[0125] SEQ ID NOs: 1114-1116 and 1119-1121, SEQ ID NOs: 1128-1130 and 1133-1135,

[0126] SEQ ID NOs: 1141-1143 and 1146-1148, SEQ ID NOs: 1155-1157 and 1160-1162, SEQ ID NOs: 1169-1171 and 1174-1176, SEQ ID NOs: 1183-1185 and 1188-1190, SEQ ID NOs: 1197-1199 and 1202-1204, SEQ ID NOs: 1211-1213 and 1216-1218, SEQ ID NOs: 1125-1227 and 1230-1232, SEQ ID NOs: 1239-1241 and 1244-1246, SEQ ID NOs:, 1253-1255 and 1258-1260, SEQ ID NOs: 1267-1269 and 1272-1274, SEQ ID NOs: 1281-1283 and 1286-1288, SEQ ID NOs: 1295-1297 and 1300-1302, SEQ ID NOs: 1309-1311 and 1314-1316, SEQ ID NOs: 1323-1325 and 1328-1330, SEQ ID NOs:1343-1345 and 1348-1350, SEQ ID NOs: 1361-1363 and 1366-1368, SEQ ID NOs:1375-1377 and 1380-1382, SEQ ID NOs: 1389- 1391 and 1394-1396, SEQ ID NOs:1403-1405 and 1408-1410, SEQ ID NOs: 1417-1419 and 1422-1424, SEQ ID NOs: 1431-1433 and 1436-1438, SEQ ID NOs:1445-1447 and 1450-1452, SEQ ID NOs:1459-1461 and 1464-1466, SEQ ID NOs: 1473-1475 and 1478-1480, SEQ ID NOs: 1486-1491, SEQ ID NOs: 1492-1497,

[0127] SEQ ID NOs: 1505-1507 and 1510-1512, SEQ ID NOs: 1531-1533 and 1536-1538, SEQ ID NOs: 1573-1575 and 1578-1580, SEQ ID NOs: 1591-1593 and 1596-1598, SEQ ID NOs: 1605-1607 and 1610-1612, and SEQ ID NOs: 1619-1621, 1624-1626, SEQ ID NOs: 1634-1636 and 1639-1641 and SEQ ID NOs: 1652-1654, SEQ ID NOs: 1657-1659 and SEQ ID NOs: 1669-1674.

[0128] A particularly preferred embodiment of the invention concerns an above characterized polypeptide, wherein the bispecific single chain antibody molecule comprises a sequence selected from:
[0129] (a) an amino acid sequence as depicted in any of SEQ ID NOs. 291, 293, 295, 297, 299, 301, 303, 305, 307, 309, 311, 313, 315, 317, 319, 321, 323, 325, 327, 329, 331, 333, 335, 337, 339, 341, 343, 345 or 347, 393, 395, 397, 411, 413, 415, 429, 431, 433, 447, 449, 451, 465, 467, 469, 483, 485, 487, 501, 503, 505, 519, 521, 523, 1336, 1338, 1340, 538, 540, 542, 556, 570, 572, 574, 588, 590, 592, 626, 628, 630, 643, 645, 647, 661, 663, 665, 679, 693, 707, 721, 735, 749, 763, 777, 791, 805, 819, 833, 847, 861, 863, 877, 879, 881, 895, 897, 899, 913, 915, 917, 931, 933, 935, 949, 951, 953, 967, 969, 971, 985, 987, 989, 1003, 1017, 1031, 1045, 1059, 1073, 1087, 1101, 1125, 1138, 1152, 1166, 1180, 1194, 1208, 1222, 1236, 1250, 1264, 1278, 1292, 1306, 1320, 1334, 1354, 1356, 1358, 1372, 1386, 1400, 1414, 1428, 1442, 1456, 1470, 1484, 1500, 1502, 1518, 1520, 1522, 1524, 1526, 1528, 1544, 1546, 1548, 1550, 1552, 1554, 1556, 1558, 1560, 1562, 1564, 1566, 1586, 1588, 1602, 1616, 1630, 1647, 1649 or 1663; and
[0130] (b) an amino acid sequence encoded by a nucleic acid sequence as depicted in any of SEQ ID NOs. 292, 294, 296, 298, 300, 302, 304, 306, 308, 310, 312, 314, 316, 318, 320, 322, 324, 326, 328, 330, 332, 334, 336, 338, 340, 342, 344, 346 or 348, 394, 396, 398, 412, 414, 416, 430, 432, 434, 448, 450, 452, 466, 468, 470, 484, 486, 488, 502, 504, 506, 520, 522, 524, 1337, 1339, 1341, 539, 541, 543, 557, 571, 573, 575, 589, 591, 593, 627, 629, 631, 644, 646, 648, 662, 664, 666, 680, 694, 708, 722, 736, 750, 764, 778, 792, 806, 820, 834, 848, 862, 864, 878, 880, 882, 896, 898, 900, 914, 916, 918, 932, 934, 936, 950, 952, 954, 968, 970, 972, 986, 988, 990, 1004, 1018, 1032, 1046, 1060, 1074, 1088, 1102, 1126, 1139, 1153, 1167, 1181, 1195, 1209, 1223, 1237, 1251, 1265, 1279, 1293, 1307, 1321, 1335, 1355, 1357, 1359, 1373, 1387, 1401, 1415, 1429, 1443, 1457, 1471, 1485, 1501, 1503, 1519, 1521, 1523, 1525, 1527, 1529, 1545, 1547, 1549, 1551, 1553, 1555, 1557, 1559, 1561, 1563, 1565, 1567, 1587, 1589, 1603, 1617, 1631, 1648, 1650 or 1664.

[0131] In a preferred embodiment of the invention, the bispecific single chain antibodies are cross-species specific for CD3 epsilon and for the cell surface antigen recognized by their second binding domain. In a more preferred embodiment these bispecific single chain antibodies are cross-species specific for human and non-chimpanzee primate CD3 epsilon and for human and non-chimpanzee primate MCSP, EGFR, EGFRvIII, Carbonic anhydrase IX, CD30, CD33, IgE, CD44v6, Muc-1, HBV and HCV. In an alternative embodiment the present invention provides a nucleic acid sequence encoding an above described polypeptide of the invention.

[0132] The present invention also relates to a vector comprising the nucleic acid molecule of the present invention.

[0133] Many suitable vectors are known to those skilled in molecular biology, the choice of which would depend on the function desired and include plasmids, cosmids, viruses, bacteriophages and other vectors used conventionally in genetic engineering. Methods which are well known to those skilled in the art can be used to construct various plasmids and vectors; see, for example, the techniques described in Sambrook et al. (loc cit.) and Ausubel, Current Protocols in Molecular Biology, Green Publishing Associates and Wiley Interscience, N.Y. (1989), (1994). Alternatively, the polynucleotides and vectors of the invention can be reconstituted into liposomes for delivery to target cells. As discussed in further details below, a cloning vector was used to isolate individual sequences of DNA. Relevant sequences can be transferred into expression vectors where expression of a particular polypeptide is required. Typical cloning vectors include pBluescript SK, pGEM, pUC9, pBR322 and pGBT9. Typical expression vectors include pTRE, pCAL-n-EK, pESP-1, pOP13CAT.

[0134] Preferably said vector comprises a nucleic acid sequence which is a regulatory sequence operably linked to said nucleic acid sequence defined herein.

[0135] The term “regulatory sequence” refers to DNA sequences, which are necessary to effect the expression of coding sequences to which they are ligated. The nature of such control sequences differs depending upon the host organism. In prokaryotes, control sequences generally include promoter, ribosomal binding site, and terminators. In eukaryotes generally control sequences include promoters, terminators and, in some instances, enhancers, transactivators or transcription factors. The term “control sequence” is intended to include, at a minimum, all components the presence of which are necessary for expression, and may also include additional advantageous components.

[0136] The term “operably linked” refers to a juxtaposition wherein the components so described are in a relationship permitting them to function in their intended manner. A control sequence “operably linked” to a coding sequence is ligated in such a way that expression of the coding sequence is achieved under conditions compatible with the control sequences. In case the control sequence is a promoter, it is obvious for a skilled person that double-stranded nucleic acid is preferably used.

[0137] Thus, the recited vector is preferably an expression vector. An “expression vector” is a construct that can be used to transform a selected host and provides for expression of a coding sequence in the selected host. Expression vectors can for instance be cloning vectors, binary vectors or integrating vectors. Expression comprises transcription of the nucleic acid molecule preferably into a translatable mRNA. Regulatory elements ensuring expression in prokaryotes and/or eukaryotic cells are well known to those skilled in the art. In the case of eukaryotic cells they comprise normally promoters ensuring initiation of transcription and optionally poly-A signals ensuring termination of transcription and stabilization of the transcript. Possible regulatory elements permitting expression in prokaryotic host cells comprise, e.g., the P_{L}, lac, trp or tac promoter in E. coli, and examples of regulatory elements permitting expression in eukaryotic host cells are the AOX1 or GAL1 promoter in yeast or the CMV-, SV40-, RSV-promoter (Rous sarcoma virus), CMV-enhancer, SV40-enhancer or a globin intron in mammalian and other animal cells.

[0138] Beside elements, which are responsible for the initiation of transcription such regulatory elements may also comprise transcription termination signals, such as the SV40-poly-A site or the tk-poly-A site, downstream of the polynucleotide. Furthermore, depending on the expression system used leader sequences capable of directing the polypeptide to a cellular compartment or secreting it into the medium may be added to the coding sequence of the recited nucleic acid sequence and are well known in the art; see also the appended Examples. The leader sequence(s) is (are) assembled in appropriate phase with translation, initiation and termination sequences, and preferably, a leader sequence capable of directing secretion of translated protein, or a portion thereof, into the periplasmic space or extracellular medium. Optionally, the heterologous sequence can encode a fusion protein including an. N-terminal identification peptide imparting desired characteristics, e.g., stabilization or simplified purification of expressed recombinant product; see supra. In this context, suitable expression vectors are known in the art such as Okayama-Berg cDNA expression vector pcDV1 (Pharmacia), pCDM8, pRc/CMV, pcDNA1, pcDNA3 (In-vitrogene), pEF-DHFR, pEF-ADA or pEF-neo (Mack et al. PNAS (1995) 92, 7021-7025 and Raum et al. Cancer Immunol Immunother (2001) 50(3), 141-150) or pSPORT1 (GIBCO BRL).

[0139] Preferably, the expression control sequences will be eukaryotic promoter systems in vectors capable of transforming of transfecting eukaryotic host cells, but control sequences for prokaryotic hosts may also be used. Once the vector has been incorporated into the appropriate host, the host is maintained under conditions suitable for high level expression of the nucleotide sequences, and as desired, the collection and purification of the polypeptide of the invention may follow; see, e.g., the appended examples.

[0140] An alternative expression system, which can be used to express a cell cycle interacting protein is an insect system. In one such system, Autographa californica nuclear polyhedrosis virus (AcNPV) is used as a vector to express foreign genes in Spodoptera frugiperda cells or in Trichoplusia larvae. The coding sequence of a recited nucleic acid molecule may be cloned into a nonessential region of the virus, such as the polyhedrin gene, and placed under control of the polyhedrin promoter. Successful insertion of said coding sequence will render the polyhedrin gene inactive and produce recombinant virus lacking coat protein coat. The recombinant viruses are then used to infect S. frugiperda cells or Trichoplusia larvae in which the protein of the invention is expressed (Smith, J. Virol. 46 (1983), 584; Engelhard, Proc. Nat. Acad. Sci. USA 91 (1994), 3224-3227).

[0141] Additional regulatory elements may include transcriptional as well as translational enhancers. Advantageously, the above-described vectors of the invention comprise a selectable and/or scorable marker.

[0142] Selectable marker genes useful for the selection of transformed cells and, e.g., plant tissue and plants are well known to those skilled in the art and comprise, for example, antimetabolite resistance as the basis of selection for dhfr, which confers resistance to methotrexate (Reiss, Plant Physiol. (Life Sci. Adv.) 13 (1994), 143-149); npt, which confers resistance to the aminoglycosides neomycin, kanamycin and paromycin (Herrera-Estrella, EMBO J. 2 (1983), 987-995) and hygro, which confers resistance to hygromycin (Marsh, Gene 32 (1984), 481-485). Additional selectable genes have been described, namely trpB, which allows cells to utilize indole in place of tryptophan; hisD, which allows cells to utilize histinol in place of histidine (Hartman, Proc. Natl. Acad. Sci. USA 85 (1988), 8047); mannose-6-phosphate isomerase which allows cells to utilize mannose (WO 94/20627) and ODC (ornithine decarboxylase) which confers resistance to the ornithine decarboxylase inhibitor, 2-(difluoromethyl)-DL-ornithine, DFMO (McConlogue, 1987, In: Current Communications in Molecular Biology, Cold Spring Harbor Laboratory ed.) or deaminase from Aspergillus terreus which confers resistance to Blasticidin S (Tamura, Biosci. Biotechnol. Biochem. 59 (1995), 2336-2338).

[0143] Useful scorable markers are also known to those skilled in the art and are commercially available. Advantageously, said marker is a gene encoding luciferase (Giacomin, P I. Sci. 116 (1996), 59-72; Scikantha, J. Bact. 178 (1996), 121), green fluorescent protein (Gerdes, FEBS Lett. 389 (1996), 44-47) or β-glucuronidase (Jefferson, EMBO J. 6 (1987), 3901-3907). This embodiment is particularly useful for simple and rapid screening of cells, tissues and organisms containing a recited vector.

[0144] As described above, the recited nucleic acid molecule can be used alone or as part of a vector to express the polypeptide of the invention in cells, for, e.g., purification but also for gene therapy purposes. The nucleic acid molecules or vectors containing the DNA sequence(s) encoding any one of the above described polypeptide of the invention is introduced into the cells which in turn produce the polypeptide of interest. Gene therapy, which is based on introducing therapeutic genes into cells by ex-vivo or in-vivo techniques is one of the most important applications of gene transfer. Suitable vectors, methods or gene-delivery systems for in-vitro or in-vivo gene therapy are described in the literature and are known to the person skilled in the art; see, e.g., Giordano, Nature Medicine 2 (1996), 534-539; Schaper, Circ. Res. 79 (1996), 911-919; Anderson, Science 256 (1992), 808-813; Verma, Nature 389 (1994), 239; Isner, Lancet 348 (1996), 370-374; Muhlhauser, Circ. Res. 77 (1995), 1077-1086; Onodera, Blood 91 (1998), 30-36; Verma, Gene Ther. 5 (1998), 692-699; Nabel, Ann. N.Y. Acad. Sci. 811 (1997), 289-292; Verzeletti, Hum. Gene Ther. 9 (1998), 2243-51; Wang, Nature Medicine 2 (1996), 714-716; WO 94/29469; WO 97/00957, U.S. Pat. No. 5,580,859; U.S. Pat. No. 5,589,466; or Schaper, Current Opinion in Biotechnology 7 (1996), 635-640. The recited nucleic acid molecules and vectors may be designed for direct introduction or for introduction via liposomes, or viral vectors (e.g., adenoviral, retroviral) into the cell. Preferably, said cell is a germ line cell, embryonic cell, or egg cell or derived there from, most preferably said cell is a stem cell. An example for an embryonic stem cell can be, inter alia, a stem cell as described in Nagy, Proc. Natl. Acad. Sci. USA 90 (1993), 8424-8428.

[0145] The invention also provides for a host transformed or transfected with a vector of the invention. Said host may be produced by introducing the above described vector of the invention or the above described nucleic acid molecule of the invention into the host. The presence of at least one vector or at least one nucleic acid molecule in the host may mediate the expression of a gene encoding the above described single chain antibody constructs.

[0146] The described nucleic acid molecule or vector of the invention, which is introduced in the host may either integrate into the genome of the host or it may be maintained extrachromosomally.

[0147] The host can be any prokaryote or eukaryotic cell.

[0148] The term “prokaryote” is meant to include all bacteria, which can be transformed or transfected with DNA or RNA molecules for the expression of a protein of the invention. Prokaryotic hosts may include gram negative as well as gram positive bacteria such as, for example, E. coli, S. typhimurium, Serratia marcescens and Bacillus subtilis. The term “eukaryotic” is meant to include yeast, higher plant, insect and preferably mammalian cells. Depending upon the host employed in a recombinant production procedure, the protein encoded by the polynucleotide of the present invention may be glycosylated or may be non-glycosylated. Especially preferred is the use of a plasmid or a virus containing the coding sequence of the polypeptide of the invention and genetically fused thereto an N-terminal FLAG-tag and/or C-terminal His-tag. Preferably, the length of said FLAG-tag is about 4 to 8 amino acids, most preferably 8 amino acids. An above described polynucleotide can be used to transform or transfect the host using any of the techniques commonly known to those of ordinary skill in the art. Furthermore, methods for preparing fused, operably linked genes and expressing them in, e.g., mammalian cells and bacteria are well-known in the art (Sambrook, loc cit.).

[0149] Preferably, said the host is a bacterium or an insect, fungal, plant or animal cell.

[0150] It is particularly envisaged that the recited host may be a mammalian cell. Particularly preferred host cells comprise CHO cells, COS cells, myeloma cell lines like SP2/0 or NS/0. As illustrated in the appended examples, particularly preferred are CHO-cells as hosts.

[0151] More preferably said host cell is a human cell or human cell line, e.g. per.c6 (Kroos, Biotechnol. Prog., 2003, 19:163-168).

[0152] In a further embodiment, the present invention thus relates to a process for the production of a polypeptide of the invention, said process comprising culturing a host of the invention under conditions allowing the expression of the polypeptide of the invention and recovering the produced polypeptide from the culture.

[0153] The transformed hosts can be grown in fermentors and cultured according to techniques known in the art to achieve optimal cell growth. The polypeptide of the invention can then be isolated from the growth medium, cellular lysates, or cellular membrane fractions. The isolation and purification of the, e.g., microbially expressed polypeptides of the invention may be by any conventional means such as, for example, preparative chromatographic separations and immunological separations such as those involving the use of monoclonal or polyclonal antibodies directed, e.g., against a tag of the polypeptide of the invention or as described in the appended examples.

[0154] The conditions for the culturing of a host, which allow the expression are known in the art to depend on the host system and the expression system/vector used in such process. The parameters to be modified in order to achieve conditions allowing the expression of a recombinant polypeptide are known in the art. Thus, suitable conditions can be determined by the person skilled in the art in the absence of further inventive input.

[0155] Once expressed, the polypeptide of the invention can be purified according to standard procedures of the art, including ammonium sulfate precipitation, affinity columns, column chromatography, gel electrophoresis and the like; see, Scopes, “Protein Purification”, Springer-Verlag, N.Y. (1982). Substantially pure polypeptides of at least about 90 to 95% homogeneity are preferred, and 98 to 99% or more homogeneity are most preferred, for pharmaceutical uses. Once purified, partially or to homogeneity as desired, the polypeptide of the invention may then be used therapeutically (including extracorporeally) or in developing and performing assay procedures. Furthermore, examples for methods for the recovery of the polypeptide of the invention from a culture are described in detail in the appended examples.

[0156] Furthermore, the invention provides for a composition comprising a polypeptide of the invention or a polypeptide as produced by the process disclosed above.

[0157] Preferably, said composition is a pharmaceutical composition.

[0158] In accordance with the invention, the term “pharmaceutical composition” relates to a composition for administration to a patient, preferably a human patient. The particular preferred pharmaceutical composition of this invention comprises binding molecules directed against and generated against context-independent CD3 epitopes. Preferably, the pharmaceutical composition comprises suitable formulations of carriers, stabilizers and/or excipients. In a preferred embodiment, the pharmaceutical composition comprises a composition for parenteral, transdermal, intraluminal, intraarterial, intrathecal and/or intranasal administration or by direct injection into tissue. It is in particular envisaged that said composition is administered to a patient via infusion or injection. Administration of the suitable compositions may be effected by different ways, e.g., by intravenous, intraperitoneal, subcutaneous, intramuscular, topical or intradermal administration. In particular, the present invention provides for an uninterrupted administration of the suitable composition. As a non-limiting example, uninterrupted, i.e. continuous administration may be realized by a small pump system worn by the patient for metering the influx of therapeutic agent into the body of the patient. The pharmaceutical composition comprising the binding molecules directed against and generated against context-independent CD3 epitopes of the invention can be administered by using said pump systems. Such pump systems are generally known in the art, and commonly rely on periodic exchange of cartridges containing the therapeutic agent to be infused. When exchanging the cartridge in such a pump system, a temporary interruption of the otherwise uninterrupted flow of therapeutic agent into the body of the patient may ensue. In such a case, the phase of administration prior to cartridge replacement and the phase of administration following cartridge replacement would still be considered within the meaning of the pharmaceutical means and methods of the invention together make up one “uninterrupted administration” of such therapeutic agent.

[0159] The continuous or uninterrupted administration of these binding molecules directed against and generated against context-independent CD3 epitopes of this invention may be intravenuous or subcutaneous by way of a fluid delivery device or small pump system including a fluid driving mechanism for driving fluid out of a reservoir and an actuating mechanism for actuating the driving mechanism. Pump systems for subcutaneous administration may include a needle or a cannula for penetrating the skin of a patient and delivering the suitable composition into the patient's body. Said pump systems may be directly fixed or attached to the skin of the patient independently of a vein, artery or blood vessel, thereby allowing a direct contact between the pump system and the skin of the patient. The pump system can be attached to the skin of the patient for 24 hours up to several days. The pump system may be of small size with a reservoir for small volumes. As a non-limiting example, the volume of the reservoir for the suitable pharmaceutical composition to be administered can be between 0.1 and 50 ml.

[0160] The continuous administration may be transdermal by way of a patch worn on the skin and replaced at intervals. One of skill in the art is aware of patch systems for drug delivery suitable for this purpose. It is of note that transdermal administration is especially amenable to uninterrupted administration, as exchange of a first exhausted patch can advantageously be accomplished simultaneously with the placement of a new, second patch, for example on the surface of the skin immediately adjacent to the first exhausted patch and immediately prior to removal of the first exhausted patch. Issues of flow interruption or power cell failure do not arise.

[0161] The composition of the present invention, comprising in particular binding molecules directed against and generated against context-independent CD3 epitopes may further comprise a pharmaceutically acceptable carrier. Examples of suitable pharmaceutical carriers are well known in the art and include solutions, e.g. phosphate buffered saline solutions, water, emulsions, such as oil/water emulsions, various types of wetting agents, sterile solutions, liposomes, etc. Compositions comprising such carriers can be formulated by well known conventional methods. Formulations can comprise carbohydrates, buffer solutions, amino acids and/or surfactants. Carbohydrates may be non-reducing sugars, preferably trehalose, sucrose, octasulfate, sorbitol or xylitol. Such formulations may be used for continuous administrations which may be intravenuous or subcutaneous with and/or without pump systems. Amino acids may be charged amino acids, preferably lysine, lysine acetate, arginine, glutamate and/or histidine. Surfactants may be detergents, preferably with a molecular weight of >1.2 KD and/or a polyether, preferably with a molecular weight of >3 KD. Non-limiting examples for preferred detergents are Tween 20, Tween 40, Tween 60, Tween 80 or Tween 85. Non-limiting examples for preferred polyethers are PEG 3000, PEG 3350, PEG 4000 or PEG 5000. Buffer systems used in the present invention can have a preferred pH of 5-9 and may comprise citrate, succinate, phosphate, histidine and acetate. The compositions of the present invention can be administered to the subject at a suitable dose which can be determined e.g. by dose escalating studies by administration of increasing doses of the polypeptide of the invention exhibiting cross-species specificity described herein to non-chimpanzee primates, for instance macaques. As set forth above, the polypeptide of the invention exhibiting cross-species specificity described herein can be advantageously used in identical form in preclinical testing in non-chimpanzee primates and as drug in humans. These compositions can also be administered in combination with other proteinaceous and non-proteinaceous drugs. These drugs may be administered simultaneously with the composition comprising the polypeptide of the invention as defined herein or separately before or after administration of said polypeptide in timely defined intervals and doses. The dosage regimen will be determined by the attending physician and clinical factors. As is well known in the medical arts, dosages for any one patient depend upon many factors, including the patient's size, body surface area, age, the particular compound to be administered, sex, time and route of administration, general health, and other drugs being administered concurrently. Preparations for parenteral administration include sterile aqueous or non-aqueous solutions, suspensions, and emulsions. Examples of non-aqueous solvents are propylene glycol, polyethylene glycol, vegetable oils such as olive oil, and injectable organic esters such as ethyl oleate. Aqueous carriers include water, alcoholic/aqueous solutions, emulsions or suspensions, including saline and buffered media. Parenteral vehicles include sodium chloride solution, Ringer's dextrose, dextrose and sodium chloride, lactated Ringer's, or fixed oils. Intravenous vehicles include fluid and nutrient replenishers, electrolyte replenishers (such as those based on Ringer's dextrose), and the like. Preservatives and other additives may also be present such as, for example, antimicrobials, anti-oxidants, chelating agents, inert gases and the like. In addition, the composition of the present invention might comprise proteinaceous carriers, like, e.g., serum albumin or immunoglobulin, preferably of human origin. It is envisaged that the composition of the invention might comprise, in addition to the polypeptide of the invention defined herein, further biologically active agents, depending on the intended use of the composition. Such agents might be drugs acting on the gastro-intestinal system, drugs acting as cytostatica, drugs preventing hyperurikemia, drugs inhibiting immunoreactions (e.g. corticosteroids), drugs modulating the inflammatory response, drugs acting on the circulatory system and/or agents such as cytokines known in the art.

[0162] The biological activity of the pharmaceutical composition defined herein can be determined for instance by cytotoxicity assays, as described in the following examples, in WO 99/54440 or by Schlereth et al. (Cancer Immunol. Immunother. 20 (2005), 1-12). “Efficacy” or “in vivo efficacy” as used herein refers to the response to therapy by the pharmaceutical composition of the invention, using e.g. standardized NCI response criteria. The success or in vivo efficacy of the therapy using a pharmaceutical composition of the invention refers to the effectiveness of the composition for its intended purpose, i.e. the ability of the composition to cause its desired effect, i.e. depletion of pathologic cells, e.g. tumor cells. The in vivo efficacy may be monitored by established standard methods for the respective disease entities including, but not limited to white blood cell counts, differentials, Fluorescence Activated Cell Sorting, bone marrow aspiration. In addition, various disease specific clinical chemistry parameters and other established standard methods may be used. Furthermore, computer-aided tomography, X-ray, nuclear magnetic resonance tomography (e.g. for National Cancer Institute-criteria based response assessment [Cheson B D, Horning S J, Coiffier B, Shipp M A, Fisher R I, Connors J M, Lister T A, Vose J, Grillo-Lopez A, Hagenbeek A, Cabanillas F, Klippensten D, Hiddemann W, Castellino R, Harris N L, Armitage J O, Carter W, Hoppe R, Canellos G P. Report of an international workshop to standardize response criteria for non-Hodgkin's lymphomas. NCI Sponsored International Working Group. J Clin Oncol. 1999 Apr; 17(4):1244]), positron-emission tomography scanning, white blood cell counts, differentials, Fluorescence Activated Cell Sorting, bone marrow aspiration, lymph node biopsies/histologies, and various lymphoma specific clinical chemistry parameters (e.g. lactate dehydrogenase) and other established standard methods may be used.

[0163] Another major challenge in the development of drugs such as the pharmaceutical composition of the invention is the predictable modulation of pharmacokinetic properties. To this end, a pharmacokinetic profile of the drug candidate, i.e. a profile of the pharmacokinetic parameters that effect the ability of a particular drug to treat a given condition, is established. Pharmacokinetic parameters of the drug influencing the ability of a drug for treating a certain disease entity include, but are not limited to: half-life, volume of distribution, hepatic first-pass metabolism and the degree of blood serum binding. The efficacy of a given drug agent can be influenced by each of the parameters mentioned above.

[0164] “Half-life” means the time where 50% of an administered drug are eliminated through biological processes, e.g. metabolism, excretion, etc.

[0165] By “hepatic first-pass metabolism” is meant the propensity of a drug to be metabolized upon first contact with the liver, i.e. during its first pass through the liver. “Volume of distribution” means the degree of retention of a drug throughout the various compartments of the body, like e.g. intracellular and extracellular spaces, tissues and organs, etc. and the distribution of the drug within these compartments.

[0166] “Degree of blood serum binding” means the propensity of a drug to interact with and bind to blood serum proteins, such as albumin, leading to a reduction or loss of biological activity of the drug.

[0167] Pharmacokinetic parameters also include bioavailability, lag time (Tlag), Tmax, absorption rates, more onset and/or Cmax for a given amount of drug administered.

[0168] “Bioavailability” means the amount of a drug in the blood compartment.

[0169] “Lag time” means the time delay between the administration of the drug and its detection and measurability in blood or plasma.

[0170] “Tmax” is the time after which maximal blood concentration of the drug is reached, and “Cmax” is the blood concentration maximally obtained with a given drug. The time to reach a blood or tissue concentration of the drug which is required for its biological effect is influenced by all parameters. Pharmacokinetik parameters of bispecific single chain antibodies, a preferred embodiment of the polypeptide of the invention, exhibiting cross-species specificity, which may be determined in preclinical animal testing in non-chimpanzee primates as outlined above are also set forth e.g. in the publication by Schlereth et al. (Cancer lmmunol. Immunother. 20 (2005), 1-12).

[0171] The term “toxicity” as used herein refers to the toxic effects of a drug manifested in adverse events or severe adverse events. These side events might refer to a lack of tolerability of the drug in general and/or a lack of local tolerance after administration. Toxicity could also include teratogenic or carcinogenic effects caused by the drug.

[0172] The term “safety”, “in vivo safety” or “tolerability” as used herein defines the administration of a drug without inducing severe adverse events directly after administration (local tolerance) and during a longer period of application of the drug. “Safety”, “in vivo safety” or “tolerability” can be evaluated e.g. at regular intervals during the treatment and follow-up period. Measurements include clinical evaluation, e.g. organ manifestations, and screening of laboratory abnormalities. Clinical evaluation may be carried out and deviating to normal findings recorded/coded according to NCI-CTC and/or MedDRA standards. Organ manifestations may include criteria such as allergy/immunology, blood/bone marrow, cardiac arrhythmia, coagulation and the like, as set forth e.g. in the Common Terminology Criteria for adverse events v3.0 (CTCAE). Laboratory parameters which may be tested include for instance haematology, clinical chemistry, coagulation profile and urine analysis and examination of other body fluids such as serum, plasma, lymphoid or spinal fluid, liquor and the like. Safety can thus be assessed e.g. by physical examination, imaging techniques (i.e. ultrasound, x-ray, CT scans, Magnetic Resonance Imaging (MRI), other measures with technical devices (i.e. electrocardiogram), vital signs, by measuring laboratory parameters and recording adverse events. For example, adverse events in non-chimpanzee primates in the uses and methods according to the invention may be examined by histopathological and/or histochemical methods.

[0173] The term “effective and non-toxic dose” as used herein refers to a tolerable dose of the bispecific single chain antibody as defined herein which is high enough to cause depletion of pathologic cells, tumor elimination, tumor shrinkage or stabilization of disease without or essentially without major toxic effects. Such effective and non-toxic doses may be determined e.g. by dose escalation studies described in the art and should be below the dose inducing severe adverse side events (dose limiting toxicity, DLT).

[0174] The above terms are also referred to e.g. in the Preclinical safety evaluation of biotechnology-derived pharmaceuticals S6; ICH Harmonised Tripartite Guideline; ICH Steering Committee meeting on Jul. 16, 1997.

[0175] Moreover, the invention relates to a pharmaceutical composition comprising a polypeptide of this invention (i.e. a polypeptide comprising at least one binding domain capable of binding to an epitope of human and non-chimpanzee primate CD3 epsilon chain, wherein the epitope is part of an amino acid sequence comprised in the group consisting of SEQ ID NOs. 2, 4, 6, or 8 in accordance with this invention or produced according to the process according to the invention) for the prevention, treatment or amelioration of a disease selected from a proliferative disease, a tumorous disease, or an immunological disorder. Preferably, said pharmaceutical composition further comprises suitable formulations of carriers, stabilizers and/or excipients.

[0176] A further aspect of the invention relates to a use of a polypeptide as defined herein above or produced according to a process defined herein above, for the preparation of a pharmaceutical composition for the prevention, treatment or amelioration of a disease. Preferably, said disease is a proliferative disease, a tumorous disease, or an immunological disorder. It is further preferred that said tumorous disease is a malignant disease, preferably cancer.

[0177] In another preferred embodiment of use of the polypeptide of the invention said pharmaceutical composition is suitable to be administered in combination with an additional drug, i.e. as part of a co-therapy. In said co-therapy, an active agent may be optionally included in the same pharmaceutical composition as the polypeptide of the invention, or may be included in a separate pharmaceutical composition. In this latter case, said separate pharmaceutical composition is suitable for administration prior to, simultaneously as or following administration of said pharmaceutical composition comprising the polypeptide of the invention. The additional drug or pharmaceutical composition may be a non-proteinaceous compound or a proteinaceous compound. In the case that the additional drug is a proteinaceous compound, it is advantageous that the proteinaceous compound be capable of providing an activation signal for immune effector cells.

[0178] Preferably, said proteinaceous compound or non-proteinaceous compound may be administered simultaneously or non-simultaneously with the polypeptide of the invention, a nucleic acid molecule as defined hereinabove, a vector as defined as defined hereinabove, or a host as defined as defined hereinabove.

[0179] Another aspect of the invention relates to a method for the prevention, treatment or amelioration of a disease in a subject in the need thereof, said method comprising the step of administration of an effective amount of a pharmaceutical composition of the invention. Preferably, said disease is a proliferative disease, a tumorous disease, or an immunological disorder. Even more preferred, said tumorous disease is a malignant disease, preferably cancer.

[0180] In another preferred embodiment of the method of the invention said pharmaceutical composition is suitable to be administered in combination with an additional drug, i.e. as part of a co-therapy. In said co-therapy, an active agent may be optionally included in the same pharmaceutical composition as the polypeptide of the invention, or may be included in a separate pharmaceutical composition. In this latter case, said separate pharmaceutical composition is suitable for administration prior to, simultaneously as or following administration of said pharmaceutical composition comprising the polypeptide of the invention. The additional drug or pharmaceutical composition may be a non-proteinaceous compound or a proteinaceous compound. In the case that the additional drug is a proteinaceous compound, it is advantageous that the proteinaceous compound be capable of providing an activation signal for immune effector cells.

[0181] Preferably, said proteinaceous compound or non-proteinaceous compound may be administered simultaneously or non-simultaneously with the polypeptide of the invention, a nucleic acid molecule as defined hereinabove, a vector as defined as defined hereinabove, or a host as defined as defined hereinabove.

[0182] It is preferred for the above described method of the invention that said subject is a human.

[0183] In a further aspect, the invention relates to a kit comprising a polypeptide of the invention, a nucleic acid molecule of the invention, a vector of the invention, or a host of the invention.

[0184] The present invention is further characterized by the following list of items:

[0185] Item 1. A method for the identification of (a) polypeptide(s) comprising a cross-species specific binding domain capable of binding to an epitope of human and non-chimpanzee primate CD3 epsilon (CD3c), the method comprising the steps of:

[0186] (a) contacting the polypeptide(s) with an N-terminal fragment of the extracellular domain of CD3ε of maximal 27 amino acids comprising the amino acid sequence Gln-Asp-Gly-Asn-Glu-Glu-Met-Gly (SEQ ID NO. 381) or Gln-Asp-Gly-Asn-Glu-Glu-Ile-Gly (SEQ ID NO. 382), fixed via its C-terminus to a solid phase;

[0187] (b) eluting the bound polypeptide(s) from said fragment; and

[0188] (c) isolating the polypeptide(s) from the eluate of (b).

[0189] It is preferred that the polypeptide(s) identified by the above method of the invention are of human origin.

[0190] The present “method for the identification of (a) polypeptide(s)” is understood as a method for the isolation of one or more different polypeptides with the same specificity for the fragment of the extracellular domain of CD3ε comprising at its N-terminus the amino acid sequence Gln-Asp-Gly-Asn-Glu-Glu-Met-Gly (SEQ ID NO. 381) or Gln-Asp-Gly-Asn-Glu-Glu-Ile-Gly (SEQ ID NO. 382) from a plurality of polypeptide candidates as well as a method for the purification of a polypeptide from a solution. Non-limiting embodiments of a method of the isolation of one or more different polypeptides with the same specificity for the fragment of the extracellular domain of CD3ε comprise methods for the selection of antigen-specific binding entities, e.g. panning methods as commonly used for hybridoma screening, screening of transiently/stably transfected clones of eukaryotic host cells or in phage display methods. A non-limiting example for the latter method for the purification of a polypeptide from a solution is e.g. the purification of a recombinantly expressed polypeptide from a culture supernatant or a preparation from such culture.

[0191] As stated above the fragment used in the method of the invention is a N-terminal fragment of the extracellular domain of the primate CD3ε molecule. The amino acid sequence of the extracellular domain of the CD3ε molecule of different primates is depicted in SEQ ID NOs: 1, 3, 5 and 7. The two forms of the N-terminal octamer are depicted in SEQ ID NOs: 381 and 382. It is preferred that this N-terminus is freely available for binding of the polypeptides to be identified by the method of the invention. The term “freely available” is understood in the context of the invention as free of additional motives such as a His-tag. The interference of such a His-tag with a binding molecule identified by the method of the invention is described in the appended Examples 6 and 34.

[0192] According to the method of the invention said fragment is fixed via its C-terminus to a solid phase. The person skilled in the art will easily and without any inventive ado elect a suitable solid phase support dependent from the used embodiment of the method of the invention. Examples for a solid support comprise but are not limited to matrices like beads (e.g. agarose beads, sepharose beads, polystyrol beads, dextran beads), plates (culture plates or MultiWell plates) as well as chips known e.g. from Biacore®. The selection of the means and methods for the fixation/immobilization of the fragment to said solid support depend on the election of the solid support. A commonly used method for the fixation/immobilization is a coupling via an N-hydroxysuccinimide (NHS) ester. The chemistry underlying this coupling as well as alternative methods for the fixation/immobilization are known to the person skilled in the art, e.g. from Hermanson “Bioconjugate Techniques”, Academic Press, Inc. (1996). For the fixation to/immobilization on chromatographic supports the following means are commonly used: NHS-activated sepharose (e.g. HiTrap-NHS of GE Life Science—Amersham), CnBr-activated sepharose (e.g. GE Life Science—Amersham), NHS-activated dextran beads (Sigma) or activated polymethacrylate. These reagents may also be used in a batch approach. Moreover, dextran beads comprising iron oxide (e.g. available from Miltenyi) may be used in a batch approach. These beads may be used in combination with a magnet for the separation of the beads from a solution. Polypeptides can be immobilized on a Biacore chip (e.g. CM5 chips) by the use of NHS activated carboxymethyldextran. Further examples for an appropriate solid support are amine reactive MultiWell plates (e.g. Nunc Immobilizer™ plates).

[0193] According to the method of the invention said fragment of the extracellular domain of CD3 epsilon can be directly coupled to the solid support or via a stretch of amino acids, which might be a linker or another protein/polypeptide moiety. Alternatively, the extracellular domain of CD3 epsilon can be indirectly coupled via one or more adaptor molecule(s).

[0194] Means and methods for the eluation of a peptide bound to an immobilized epitope are well known in the art. The same holds true for methods for the isolation of the identified polypeptide(s) from the eluate.

[0195] In line with the invention a method for the isolation of one or more different polypeptides with the same specificity for the fragment of the extracellular domain of CD3ε comprising at its N-terminus the amino acid sequence Gln-Asp-Gly-Asn-Glu-Glu-X-Gly from a plurality of polypeptide candidates may comprise one or more steps of the following methods for the selection of antigen-specific entities:

[0196] CD3ε specific binding molecules can be selected from antibody derived repertoires. A phage display library can be constructed based on standard procedures, as for example disclosed in “Phage Display: A Laboratory Manual”; Ed. Barbas, Burton, Scott & Silverman; Cold Spring Harbor Laboratory Press, 2001. The format of the antibody fragments in the antibody library can be scFv, but may generally also be a Fab fragment or even a single domain antibody fragment. For the isolation of antibody fragments naïve antibody fragment libraries may be used. For the selection of potentially low immunogenic binding entities in later therapeutic use, human antibody fragment libraries may be favourable for the direct selection of human antibody fragments. In some cases they may form the basis for synthetic antibody libraries (Knappik et al. J Mol. Biol. 2000, 296:57 ff). The corresponding format may be Fab, scFv (as described below) or domain antibodies (dAbs, as reviewed in Holt et al., Trends Biotechnol. 2003, 21:484 ff).

[0197] It is also known in the art that in many cases there is no immune human antibody source available against the target antigen. Therefore animals are immunized with the target antigen and the respective antibody libraries isolated from animal tissue as e.g. spleen or PBMCs. The N-terminal fragment may be biotinylated or covalently linked to proteins like KLH or bovine serum albumin (BSA). According to common approaches rodents are used for immunization. Some immune antibody repertoires of non-human origin may be especially favourable for other reasons, e.g. for the presence of single domain antibodies (VHH) derived from cameloid species (as described in Muyldermans, J Biotechnol. 74:277; De Genst et al. Dev Como Immunol. 2006, 30:187 ff). Therefore a corresponding format of the antibody library may be Fab, scFv (as described below) or single domain antibodies (VHH).

[0198] In one possible approach ten weeks old F1 mice from balb/c×C57black crossings can be immunized with whole cells e.g. expressing transmembrane EpCAM N-terminally displaying as translational fusion the N-terminal amino acids 1 to 27 of the mature CD3c chain. Alternatively, mice can be immunized with 1-27 CD3 epsilon-Fc fusion protein (a corresponding approach is described in the appended Example 2). After booster immunization(s), blood samples can be taken and antibody serum titer against the CD3-positive T cells can be tested e.g. in FACS analysis. Usually, serum titers are significantly higher in immunized than in non-immunized animals. Immunized animals may form the basis for the construction of immune antibody libraries. Examples of such libraries comprise phage display libraries. Such libraries may be generally constructed based on standard procedures, as for example disclosed in “Phage Display: A Laboratory Manual”; Ed. Barbas, Burton, Scott & Silverman; Cold Spring Harbor Laboratory Press, 2001.

[0199] The non-human antibodies can also be humanized via phage display due to the generation of more variable antibody libraries that can be subsequently enriched for binders during selection.

[0200] In a phage display approach any one of the pools of phages that displays the antibody libraries forms a basis to select binding entities using the respective antigen as target molecule. The central step in which antigen specific, antigen bound phages are isolated is designated as panning. Due to the display of the antibody fragments on the surface of the phages, this general method is called phage display. One preferred method of selection is the use of small proteins such as the filamentous phage N2 domain translationally fused to the N-terminus of the scFv displayed by the phage. Another display method known in the art, which may be used to isolate binding entities is the ribosome display method (reviewed in Groves & Osbourn, Expert Opin Biol Ther. 2005, 5:125 ff; Lipovsek & Pluckthun, J Immunol Methods 2004, 290:52 ff).

[0201] In order to demonstrate binding of scFv phage particles to a 1-27 CD3ε-Fc fusion protein a phage library carrying the cloned scFv-repertoire can be harvested from the respective culture supernatant by PEG (polyethyleneglycole). ScFv phage particles may be incubated with immobilized CD38 Fc fusion protein. The immobilized CD3ε Fc fusion protein may be coated to a solid phase. Binding entities can be eluted and the eluate can be used for infection of fresh uninfected bacterial hosts. Bacterial hosts successfully transduced with a phagemid copy, encoding a human scFv-fragment, can be selected again for carbenicillin resistance and subsequently infected with e.g. VCMS 13 helper phage to start the second round of antibody display and in vitro selection. A total of 4 to 5 rounds of selections is carried out, normally.

[0202] The binding of isolated binding entities can be tested on CD3epsilon positive Jurkat cells, HPBaII cells, PBMCs or transfected eukaryotic cells that carry the N-terminal CD3ε sequence fused to surface displayed EpCAM using a flow cytometric assay (see appended Example 4).

[0203] Item 2. The method of item 1, wherein the polypeptide(s) comprise(s) the identified binding domain as a first binding domain and a second binding domain capable of binding to a cell surface antigen.

[0204] For the generation of the second binding domain of the polypeptide identified by the method of the invention, e.g. bispecific single chain antibodies as defined herein, monoclonal antibodies binding to both of the respective human and non-chimpanzee primate cell surface antigens can be used. Appropriate binding domains for the bispecific polypeptide as defined herein e.g. can be derived from cross-species specific monoclonal antibodies by recombinant methods described in the art. A monoclonal antibody binding to a human cell surface antigen and to the homolog of said cell surface antigen in a non-chimpanzee primate can be tested by FACS assays as set forth above. Hybridoma techniques as described in the literature (Milstein and Köhler, Nature 256 (1975), 495-7) can also be used for the generation of cross-species specific antibodies. For example, mice may be alternately immunized with human and non-chimpanzee primate CD33. From these mice, cross-species specific antibody-producing hybridoma cells can be isolated via hybridoma technology and analysed by FACS as set forth above. The generation and analysis of bispecific polypeptides such as bispecific single chain antibodies exhibiting cross-species specificity as described herein is shown in the following Examples. The advantages of the bispecific single chain antibodies exhibiting cross-species specificity include the points enumerated below.

[0205] Item 3. The method of item 2, wherein the second binding domain binds to a cell surface antigen of a human and a non-chimpanzee primate.

[0206] Item 4. The method of any of items 1 to 3, wherein the first binding domain is an antibody.

[0207] Item 5. The method of item 4, wherein the antibody is a single chain antibody.

[0208] Item 6. The method of any of items 2 to 5, wherein the second binding domain is an antibody.

[0209] Item 7. The method of any of items 1 to 6, wherein the fragment of the extracellular domain of CD3ε consists of one or more fragments of a polypeptide having an amino acid sequence of any one depicted in SEQ ID NOs.2, 4, 6 or 8.

[0210] Item 8. The method of item 7, wherein said fragment is 8, 9, 10, 11, 12, 13, 14, 15, 16, 17, 18, 19, 20, 21, 22, 23, 24, 25, 26, 27 amino acid residues in length.

[0211] Item 9.The method of any of items 1 to 8, wherein the method of identification is a method of screening a plurality of polypeptides comprising a cross-species specific binding domain binding to an epitope of human and non-chimpanzee primate CD3ε.

[0212] Item 10. The method of any of items 1 to 8, wherein the method of identification is a method of purification/isolation of a polypeptide comprising a cross-species specific binding domain binding to an epitope of human and non-chimpanzee primate CD3ε.

[0213] Item 11. Use of an N-terminal fragment of the extracellular domain of CD3ε of maximal 27 amino acids comprising the amino acid sequence Gln-Asp-Gly-Asn-Glu-Glu-Met-Gly (SEQ ID NO. 381) or Gln-Asp-Gly-Asn-Glu-Glu-Ile-Gly (SEQ ID NO. 382) for the generation of a cross-species specific binding domain.

[0214] In line with said use of the invention it is preferred that the generated cross-species specific binding domain is of human origin.

[0215] Item 12. Use according to item 11, wherein the cross-species specific binding domain is an antibody.

[0216] Item 13. Use according to item 12, wherein the antibody is a single chain antibody.

[0217] Item 14. Use according to items 12 to 13, wherein the antibody is a bispecific antibody.

[0218] These and other embodiments are disclosed and encompassed by the description and Examples of the present invention. Recombinant techniques and methods in immunology are described e.g. in Sambrook et al. Molecular Cloning: A Laboratory Manual; Cold Spring Harbor Laboratory Press, 3^{rd} edition 2001; Lefkovits; Immunology Methods Manual; The Comprehensive Sourcebook of Techniques; Academic Press, 1997; Golemis; Protein-Protein Interactions: A Molecular Cloning Manual; Cold Spring Laboratory Press, 2002. Further literature concerning any one of the antibodies, methods, uses and compounds to be employed in accordance with the present invention may be retrieved from public libraries and databases, using for example electronic devices. For example, the public database “Medline”, available on the Internet, may be utilized, for example under http://www.ncbi.nlm.nih.gov/PubMed/medline.html. Further databases and addresses such as http://www.ncbi.nlm.nih.gov/ or listed at the EMBL-services homepage under http://www.embl.de/services/index.html are known to the person skilled in the art and can also be obtained using, e. g., http://www. google.com.

[0219] The figures show:

[0220] FIG. 1

[0221] Fusion of the N-terminal amino acids 1-27 of primate CD3 epsilon to a heterologous soluble protein.

[0222] FIG. 2

[0223] The figure shows the average absorption values of quadruplicate samples measured in an ELISA assay detecting the presence of a construct consisting of the N-terminal amino acids 1-27 of the mature human CD3 epsilon chain fused to the hinge and Fc gamma portion of human IgG1 and a C-terminal 6 Histidine tag in a supernatant of transiently transfected 293 cells. The first column labeled “27 aa huCD3E” shows the average absorption value for the construct, the second column labeled “irrel. SN” shows the average value for a supernatant of 293 cells transfected with an irrelevant construct as negative control. The comparison of the values obtained for the construct with the values obtained for the negative control clearly demonstrates the presence of the recombinant construct.

[0224] FIG. 3

[0225] The figure shows the average absorption values of quadruplicate samples measured in an ELISA assay detecting the binding of the cross species specific anti-CD3 binding molecules in form of crude preparations of periplasmatically expressed single-chain antibodies to a construct comprising the N-terminal 1-27 amino acids of the mature human CD3 epsilon chain fused to the hinge and Fc gamma portion of human IgG1 and a C-terminal His6 tag. The columns show from left to right the average absorption values for the specificities designated as A2J HLP, I2C HLP E2M HLP, F7O HLP, G4H HLP, H2C HLP, E1L HLP, F12Q HLP, F6A HLP and H1E HLP.

[0226] The rightmost column labelled “neg. contr.” shows the average absorption value for the single-chain preparation of a murine anti-human CD3 antibody as negative control. The comparison of the values obtained for the anti-CD3 specificities with the values obtained for the negative control clearly demonstrates the strong binding of the anti-CD3 specificities to the N-terminal 1-27 amino acids of the mature human CD3 epsilon chain.

[0227] FIG. 4

[0228] Fusion of the N-terminal amino acids 1-27 of primate CD3 epsilon to a heterologous membrane bound protein.

[0229] FIG. 5

[0230] Histogram overlays of different transfectants tested in a FACS assay detecting the presence of recombinant transmembrane fusion proteins consisting of cynomolgus EpCAM and the N-terminal 1-27 amino acids of the human, marmoset, tamarin, squirrel monkey and domestic swine CD3 epsilon chain respectively. The histogram overlays from left to right and top to bottom show the results for the transfectants expressing the constructs comprising the human 27 mer, marmoset 27 mer, tamarin 27 mer, squirrel monkey 27 mer and swine 27 mer respectively. In the individual overlays the thin line represents a sample incubated with PBS with 2% FCS instead of anti-Flag M2 antibody as negative control and the bold line shows a sample incubated with the anti-Flag M2 antibody. For each construct the overlay of the histograms shows binding of the anti-Flag M2 antibody to the transfectants, which clearly demonstrates the expression of the recombinant constructs on the transfectants.

[0231] FIG. 6

[0232] Histogram overlays of different transfectants tested in a FACS assay detecting the binding of the cross-species specific anti-CD3 binding molecules in form of crude preparations of periplasmatically expressed single-chain antibodies to the N-terminal amino acids 1-27 of the human, marmoset, tamarin and squirrel monkey CD3 epsilon chain respectively fused to cynomolgus EpCAM.

[0233] FIG. 6A:

[0234] The histogram overlays from left to right and top to bottom show the results for the transfectants expressing the 1-27 CD3-EpCAM comprising the human 27 mer tested with the CD3 specific binding molecules designated H2C HLP, F12Q HLP, E2M HLP and G4H HLP respectively.

[0235] FIG. 6B:

[0236] The histogram overlays from left to right and top to bottom show the results for the transfectants expressing the 1-27 CD3-EpCAM comprising the marmoset 27 mer tested with the CD3 specific binding molecules designated H2C HLP, F12Q HLP, E2M HLP and G4H HLP respectively.

[0237] FIG. 6C:

[0238] The histogram overlays from left to right and top to bottom show the results for the transfectants expressing the 1-27 CD3-EpCAM comprising the tamarin 27 mer tested with the CD3 specific binding molecules designated H2C HLP, F12Q HLP, E2M HLP and G4H HLP respectively.

[0239] FIG. 6D:

[0240] The histogram overlays from left to right and top to bottom show the results for the transfectants expressing the 1-27 CD3-EpCAM comprising the squirrel monkey 27 mer tested with the CD3 specific binding molecules designated H2C HLP, F12Q HLP, E2M HLP and G4H HLP respectively.

[0241] FIG. 6E:

[0242] The histogram overlays from left to right and top to bottom show the results for the transfectants expressing the 1-27 CD3-EpCAM comprising the swine 27 mer tested with the CD3 specific binding molecules designated H2C HLP, F12Q HLP, E2M HLP and G4H HLP respectively.

[0243] In the individual overlays the thin line represents a sample incubated with a single-chain preparation of a murine anti-human CD3-antibody as negative control and the bold line shows a sample incubated with the respective anti-CD3 binding molecules indicated. Considering the lack of binding to the swine 27 mer transfectants and the expression levels of the constructs shown in FIG. 5 the overlays of the histograms show specific and strong binding of the tested anti-CD3 specificities of the fully cross-species specific human bispecific single chain antibodies to cells expressing the recombinant transmembrane fusion proteins comprising the N-terminal amino acids 1-27 of the human, marmoset, tamarin and squirrel monkey CD3 epsilon chain respectively fused to cynomolgus EpCAM and show therefore multi primate cross-species specificity of the anti-CD3 binding molecules.

[0244] FIG. 7

[0245] FACS assay for detection of human CD3 epsilon on transfected murine EL4 T cells. Graphical analysis shows an overlay of histograms. The bold line shows transfected cells incubated with the anti-human CD3 antibody UCHT-1. The thin line represents cells incubated with a mouse IgG1 isotype control. Binding of the anti CD3 antibody UCHT1 clearly shows expression of the human CD3 epsilon chain on the cell surface of transfected murine EL4 T cells.

[0246] FIG. 8

[0247] Binding of cross-species specific anti CD3 antibodies to alanine-mutants in an alanine scanning experiment. In the individual Figures the columns show from left to right the calculated binding values in arbitrary units in logarithmic scale for the wild-type transfectant (WT) and for all alanine-mutants from the position 1 to 27. The binding values are calculated using the following formula:

$$value\_Sample ( x , y ) = \frac{Sample ( x , y ) - neg\_Contr . ( x )}{\begin{matrix}( UCHT - 1 ( x ) - neg\_Contr . ( x ) ) * \\ \frac{WT ( y ) - neg\_Contr . ( wt )}{UCHT - 1 ( wt ) - neg\_Contr . ( wt )}\end{matrix}}$$

[0248] In this equation value_Sample means the value in arbitrary units of binding depicting the degree of binding of a specific anti-CD3 antibody to a specific alanine-mutant as shown in the Figure, Sample means the geometric mean fluorescence value obtained for a specific anti-CD3 antibody assayed on a specific alanine-scanning transfectant, neg_Contr. means the geometric mean fluorescence value obtained for the negative control assayed on a specific alanine-mutant, UCHT-1 means the geometric mean fluorescence value obtained for the UCHT-1 antibody assayed on a specific alanine-mutant, WT means the geometric mean fluorescence value obtained for a specific anti-CD3 antibody assayed on the wild-type transfectant, x specifies the respective transfectant, y specifies the respective anti-CD3 antibody and wt specifies that the respective transfectant is the wild-type. Individual alanine-mutant positions are labelled with the single letter code of the wild-type amino acid and the number of the position.

[0249] FIG. 8A:

[0250] The figure shows the results for cross-species specific anti CD3 antibody A2J HLP expressed as chimeric IgG molecule. Reduced binding activity is observed for mutations to alanine at position 4 (asparagine), at position 23 (threonine) and at position 25 (isoleucine). Complete loss of binding is observed for mutations to alanine at position 1 (glutamine), at position 2 (aspartate), at position 3 (glycine) and at position 5 (glutamate).

[0251] FIG. 8B:

[0252] The figure shows the results for cross-species specific anti CD3 antibody E2M HLP, expressed as chimeric IgG molecule. Reduced binding activity is observed for mutations to alanine at position 4 (asparagine), at position 23 (threonine) and at position 25 (isoleucine). Complete loss of binding is observed for mutations to alanine at position 1 (glutamine), at position 2 (aspartate), at position 3 (glycine) and at position 5 (glutamate).

[0253] FIG. 8C:

[0254] The figure shows the results for cross-species specific anti CD3 antibody H2C HLP, expressed as chimeric IgG molecule. Reduced binding activity is observed for mutations to alanine at position 4 (asparagine). Complete loss of binding is observed for mutations to alanine glutamine at position 1 (glutamine), at position 2 (aspartate), at position 3 (glycine) and at position 5 (glutamate).

[0255] FIG. 8D:

[0256] shows the results for cross-species specific anti CD3 antibody F12Q HLP, tested as periplasmatically expressed single-chain antibody. Complete loss of binding is observed for mutations to alanine at position 1 (glutamine), at position 2 (aspartate), at position 3 (glycine) and at position 5 (glutamate).

[0257] FIG. 9

[0258] FACS assay detecting the binding of the cross-species specific anti-CD3 binding molecule H2C HLP to human CD3 with and without N-terminal His6 tag.

[0259] Histogram overlays are performed of the EL4 cell line transfected with wild-type human CD3 epsilon chain (left histogram) or the human CD3 epsilon chain with N-terminal His6 tag (right histogram) tested in a FACS assay detecting the binding of cross-species specific binding molecule H2C HLP. Samples are incubated with an appropriate isotype control as negative control (thin line), anti-human CD3 antibody UCHT-1 as positive control (dotted line) and cross-species specific anti-CD3 antibody H2C HLP in form of a chimeric IgG molecule (bold line).

[0260] Histogram overlays show comparable binding of the UCHT-1 antibody to both transfectants as compared to the isotype control demonstrating expression of both recombinant constructs. Histogram overlays also show binding of the anti-CD3 binding molecule H2C HLP only to the wild-type human CD3 epsilon chain but not to the His6-human CD3 epsilon chain. These results demonstrate that a free N-terminus is essential for binding of the cross-species specific anti-CD3 binding molecule H2C HLP.

[0261] FIG. 10

[0262] Saturation binding of EGFR-21-63 LH× H2C on human CD3 positive PBMC to determine the KD value of CD3 binding on cells by FACS analysis. The assay is performed as described in Example 7.

[0263] FIG. 11

[0264] FACS binding analysis of designated cross-species specific bispecific single chain constructs to CHO cells transfected with human EGFR, human CD3+ T cell line HPB-ALL, CHO cells transfected with cynomolgus EGFR and a macaque T cell line 4119 LnPx. The FACS staining is performed as described in Example 12. The thick line represents cells incubated with 2 μg/ml purified protein that are subsequently incubated with the anti-his antibody and the PE labeled detection antibody. The thin histogram line reflects the negative control: cells only incubated with the anti-his antibody and the detection antibody.

[0265] FIG. 12

[0266] Cytotoxic activity induced by designated cross-species specific single chain constructs redirected to indicated target cell lines. A) Stimulated CD4-/CD56-human PBMCs are used as effector cells, CHO cells transfected with human EGFR as target cells. B) The macaque T cell line 4119 LnPx are used as effector cells, CHO cells transfected with cynomolgus EGFR as target cells. The assay is performed as described in Example 13.

[0267] FIG. 13

[0268] Cytotoxic activity induced by designated cross-species specific single chain constructs redirected to indicated target cell lines. A) Stimulated CD4-/CD56-human PBMCs are used as effector cells, CHO cells transfected with human EGFR as target cells. B) The macaque T cell line 4119 LnPx are used as effector cells, CHO cells transfected with cynomolgus EGFR as target cells. The assay is performed as described in Example 13.

[0269] FIG. 14

[0270] FACS binding analysis of designated cross-species specific bispecific single chain constructs to CHO cells transfected with the human MCSP D3, human CD3+ T cell line HPB-ALL, CHO cells transfected with cynomolgus MCSP D3 and a macaque T cell line 4119 LnPx. The FACS staining is performed as described in Example 17. The thick line represents cells incubated with 2 μg/ml purified protein that are subsequently incubated with the anti-his antibody and the PE labeled detection antibody. The thin histogram line reflects the negative control: cells only incubated with the anti-his antibody and the detection antibody.

[0271] FIG. 15

[0272] FACS binding analysis of designated cross-species specific bispecific single chain constructs CHO cells transfected with the human MCSP D3, human CD3+ T cell line HPB-ALL, CHO cells transfected with cynomolgus MCSP D3 and a macaque T cell line 4119 LnPx. The FACS staining is performed as described in Example 17. The thick line represents cells incubated with 2 μg/ml purified protein that are subsequently incubated with the anti-his antibody and the PE labeled detection antibody. The thin histogram line reflects the negative control: cells only incubated with the anti-his antibody and the detection antibody.

[0273] FIG. 16

[0274] FACS binding analysis of designated cross-species specific bispecific single chain constructs CHO cells transfected with the human MCSP D3, human CD3+ T cell line HPB-ALL, CHO cells transfected with cynomolgus MCSP D3 and a macaque T cell line 4119 LnPx. The FACS staining is performed as described in Example 17. The thick line represents cells incubated with 2 pg/ml purified monomeric protein that are subsequently incubated with the anti-his antibody and the PE labeled detection antibody. The thin histogram line reflects the negative control: cells only incubated with the anti-his antibody and the detection antibody.

[0275] FIG. 17

[0276] Cytotoxicity activity induced by designated cross-species specific MCSP specific single chain constructs redirected to indicated target cell lines. A) Stimulated CD4-/CD56-human PBMCs are used as effector cells, CHO cells transfected with human MCSP D3 as target cells. B) The macaque T cell line 4119 LnPx are used as effector cells, CHO cells transfected with cynomolgus MCSP D3 as target cells. The assay is performed as described in Example 18.

[0277] FIG. 18

[0278] Cytotoxicity activity induced by designated cross-species specific MCSP specific single chain constructs redirected to indicated target cell lines. A) and B) The macaque T cell line 4119 LnPx are used as effector cells, CHO cells transfected with cynomolgus MCSP D3 as target cells. The assay is performed as described in Example 18.

[0279] FIG. 19

[0280] Cytotoxicity activity induced by designated cross-species specific MCSP specific single chain constructs redirected to indicated target cell lines. A) and B) Stimulated CD4-/CD56-human PBMCs are used as effector cells, CHO cells transfected with human MCSP D3 as target cells. The assay is performed as described in Example 18.

[0281] FIG. 20

[0282] Cytotoxicity activity induced by designated cross-species specific MCSP specific single chain constructs redirected to indicated target cell lines. A) Stimulated CD4-/CD56-human PBMCs are used as effector cells, CHO cells transfected with human MCSP D3 as target cells. B) The macaque T cell line 4119 LnPx are used as effector cells, CHO cells transfected with cynomolgus MCSP D3 as target cells. The assay is performed as described in Example 18.

[0283] FIG. 21

[0284] Cytotoxicity activity induced by designated cross-species specific MCSP specific single chain constructs redirected to indicated target cell lines. A) Stimulated CD4-/CD56-human PBMCs are used as effector cells, CHO cells transfected with human MCSP D3 as target cells. B) The macaque T cell line 4119 LnPx are used as effector cells, CHO cells transfected with cynomolgus MCSP D3 as target cells. The assay is performed as described in Example 18.

[0285] FIG. 22

[0286] Plasma stability of MCSP and CD3 cross-species specific bispecific single chain antibodies tested by the measurement of cytotoxicity activity induced by samples of the designated single chain constructs incubated with 50% human plasma at 37° C. and 4° C. for 24 hours respectively or with addition of 50% human plasma immediately prior to cytotoxicity testing or without addition of plasma. CHO cells transfected with human MCSP are used as target cell line and stimulated CD4-/CD56-human PBMCs are used as effector cells. The assay is performed as described in Example 19.

[0287] FIG. 23

[0288] Initial drop and recovery (i.e. redistribution) of absolute T cell counts (open squares), in peripheral blood of B-NHL patients (patent numbers 1, 7, 23, 30, 31, and 33 of Table 4), who had essentially no circulating CD19-positive target B cells (filled triangles), during the starting phase of intravenous infusion with the CD3 binding molecule CD19×CD3 recognizing a conventional context dependent CD3 epitope. Absolute cell counts are given in 1000 cells per microliter blood. The first data point shows baseline counts immediately prior to the start of infusion. The CD19×CD3 dose is given in parentheses beside the patient number.

[0289] FIG. 24

[0290] (A) Repeated T cell redistribution (open squares) in B-NHL patient #19 (Table 4) who had no circulating CD19-positive target B cells (filled triangles) and developed CNS symptoms under continuous intravenous infusion with CD19×CD3 at a starting dose of 5 μg/m²/24 h for one day followed by a sudden dose increase to 15 μg/m²/24 h. Absolute cell counts are given in 1000 cells per microliter blood. The first data point shows baseline counts immediately prior to the start of infusion. After recovery of circulating T cells from the first episode of redistribution triggered by the treatment start at 5 μg/m²/24 h the stepwise dose increase from 5 to 15 μg/m²/24 h triggered a second episode of T cell redistribution that was associated with the development of CNS symptoms dominated by confusion and disorientation.

[0291] (B) Repeated T cell redistribution in a B-NHL patient, who developed CNS symptoms under repeated intravenous bolus infusion with CD19×CD3 at 1.5 μg/m². Absolute cell counts are given in 1000 cells per microliter blood. The infusion time for each bolus administration was 2 to 4 hours. Vertical arrows indicate the start of bolus infusions. Data points at the beginning of each bolus administration show the T cell counts immediately prior to start of bolus infusion. Each bolus infusion triggered an episode of T cell redistribution followed by recovery of the T cell counts prior to the next bolus infusion. Finally the third episode of T cell redistribution was associated with the development of CNS symptoms in this patient.

[0292] FIG. 25

[0293] Complex T cell redistribution pattern (open squares) in B-NHL patient #20 (Table 4) without circulating CD19-positive target B cells (filled triangles), during ramp initiation of the CD19×CD3 infusion i.e. even gradual increase of flow-rate from almost zero to 15 μg/m²/24 h during the first 24 hours of treatment. Absolute cell counts are given in 1000 cells per microliter blood. The first data point shows baseline counts immediately prior to the start of infusion. The CD19×CD3 dose is given in parentheses beside the patient number. T cells reappearing in the circulating blood after the initial redistribution triggered by the first exposure to CD19×CD3 are partially induced to redisappear from circulating blood again by still increasing levels of CD19×CD3 during the ramp phase.

[0294] FIG. 26

[0295] T and B cell counts during treatment with CD19×CD3 of B-NHL patient #13 (Table 4) who had a significant number of circulating CD19-positive target B (lymphoma) cells (filled triangles). Absolute cell counts are given in 1000 cells per microliter blood. The first data point shows baseline counts immediately prior to the start of infusion. The CD19×CD3 dose is given in parentheses beside the patient number. T cells (open squares) disappear completely from the circulation upon start of CD19×CD3 infusion and do not reappear until the circulating CD19-positive B (lymphoma) cells (filled triangles) are depleted from the peripheral blood.

[0296] FIG. 27

[0297] Repeated T cell redistribution (open squares) in B-NHL patient #24 (Table 4), who had essentially no circulating CD19-positive target B cells (filled triangles) and developed CNS symptoms upon initiation of CD19×CD3 infusion without additional HSA as required for stabilisation of the drug (upper panel). After first recovery of circulating T cells from initial redistribution the uneven drug flow due to the lack of stabilizing HSA triggered a second episode of T cell redistribution that was associated with the development of CNS symptoms dominated by confusion and disorientation. When the same patient was restarted correctly with CD19×CD3 solution containing additional HSA for drug stabilisation, no repeated T cell redistribution was observed (lower panel) and the patient did not again develop any CNS symptoms. Absolute cell counts are given in 1000 cells per microliter blood. The first data point shows baseline counts immediately prior to the start of infusion. The CD19×CD3 dose is given in parentheses beside the patient number.

[0298] FIG. 28

[0299] Model of T cell adhesion to endothelial cells induced by monovalent binding to context dependent CD3 epitopes. Monovalent interaction of a conventional CD3 binding molecule to its context dependent epitope on CD3 epsilon can lead to an allosteric change in the conformation of CD3 followed by the recruitment of Nck2 to the cytoplasmic domain of CD3 epsilon (Gil et al. (2002) Cell 109: 901). As Nck2 is directly linked to integrins via PINCH and ILK (Legate et al. (2006) Nat Rev Mol Cell

[0300] Biol 7: 20), recruitment of Nck2 to the cytoplasmic domain of CD3 epsilon following an allosteric change in the conformation of CD3 through binding of a conventional CD3 binding molecule (like the CD19×CD3 of example 20) to its context dependent epitope on CD3 epsilon, can increase the adhesiveness of T cells to endothelial cells by transiently switching integrins on the T cell surface into their more adhesive isoform via inside-out-signalling.

[0301] FIG. 29

[0302] Cytotoxic activity of CD33-AF5 VH-VL×I2C VH-VL test material used for the in vivo study in cynomolgus monkeys as described in Example 21. Specific lysis of CD33-positive target cells was determined in a standard ⁵¹Chromium release assay at increasing concentrations of CD33-AF5 VH-VL×I2C VH-VL. Assay duration was 18 hours. The macaque T cell line 4119 LnPx was used as source of effector cells. CHO cells transfected with cynomolgus CD33 served as target cells. Effector- to target cell ratio (E:T-ratio) was 10:1. The concentration of CD33-AF5 VH-VL×12C VH-VL required for half-maximal target cell lysis (EC50) was calculated from the dose response curve with a value of 2.7 ng/ml.

[0303] FIG. 30

[0304] (A) Dose- and time-dependent depletion of CD33-positive monocytes from the peripheral blood of cynomolgus monkeys through intravenous continuous infusion of CD33-AF5 VH-VL×I2C VH-VL as described in Example 21. The percentage relative to baseline (i.e. 100%) of absolute circulating CD33-positive monocyte counts after the duration of treatment as indicated above the columns is shown for each of two cynomolgus monkeys per dose level. The dose level (i.e. infusion flow-rate) is indicated below the columns. No depletion of circulating CD33-positive monocytes was observed in animals 1 and 2 treated for 7 days at a dose of 30 μg/m²/24 h. In animals 3 and 4 treated for 7 days at a dose of 60 μg/m²/24 h circulating CD33-positive monocyte counts were reduced to 68% and 40% of baseline, respectively. At 240 μg/m²/24h circulating CD33-positive monocytes were almost completely depleted from the peripheral blood after 3 days of treatment (animals 5 and 6). At 1000 μg/m²/24 h depletion of circulating CD33-positive monocytes from the peripheral blood was completed already after 1 day of treatment (animals 7 and 8).

[0305] (B) Course of T cell and CD33-monocyte counts in peripheral blood of two cynomolgus monkeys during continuous infusion of CD33-AF5 VH-VL×I2C VH-VL for 14 days at 120 μg/m²/24 h. Absolute cell counts are given in 1000 cells per microliter blood. The first data point shows baseline counts immediately prior to the start of infusion. After initial mobilisation of CD33-monocytes during the first 12 hours upon start of infusion CD33-monocytes in peripheral blood (filled triangles) are depleted by two thirds (animal 10) and 50% (animal 9) relative to the respective baseline counts during the further course of infusion. Circulating T cell counts (open squares) show a limited initial drop followed by recovery still during the presence of circulating CD33-positive monocytic target cells.

[0306] FIG. 31

[0307] Cytotoxic activity of MCSP-G4 VH-VL×I2C VH-VL test material used for the in vivo study in cynomolgus monkeys as described in Example 22. Specific lysis of MCSP-positive target cells was determined in a standard ⁵¹Chromium release assay at increasing concentrations of MCSP-G4 VH-VL×I2C VH-VL. Assay duration was 18 hours. The macaque T cell line 4119 LnPx was used as source of effector cells. CHO cells transfected with cynomolgus MCSP served as target cells. Effector- to target cell ratio (E:T-ratio) was 10:1. The concentration of MCSP-G4 VH-VL×I2C VH-VL required for half-maximal target cell lysis (EC50) was calculated from the dose response curve with a value of 1.9 ng/ml.

[0308] FIG. 32

[0309] Absence of initial episodes of drop and subsequent recovery of absolute T cell counts (i.e. redistribution) in peripheral blood of cynomolgus monkeys during the starting phase of intravenous infusion with the CD3 binding molecule MCSP-G4 VH-VL×I2C VH-VL recognizing an essentially context independent CD3 epitope. Absolute cell counts are given in 1000 cells per microliter blood. The first data point shows baseline counts immediately prior to the start of infusion. The MCSP-G4 VH-VL×I2C VH-VL dose is given in parentheses beside the animal number. In the known absence of MCSP-positive target cells from the circulating blood of cynomolgus monkeys there is no induction of T cell redistribution (i.e. an initial episode of drop and subsequent recovery of absolute T cell counts) through target cell mediated crosslinking of CD3. Moreover, induction of T cell redistribution (i.e. an initial episode of drop and subsequent recovery of absolute T cell counts) through a signal, which the T cells may receive through exclusive interaction with a CD3 binding site only, can be avoided by the use of CD3 binding molecules like MCSP-G4 VH-VL×I2C VH-VL recognizing an essentially context independent CD3 epitope.

[0310] FIG. 33

[0311] FACS binding analysis of designated cross-species specific bispecific constructs to CHO cells transfected with human CD33, the human CD3+ T cell line HPB-ALL,

[0312] CHO cells transfected with macaque CD33 and macaque PBMC respectively. The FACS staining is performed as described in Example 23.4. The bold lines represent cells incubated with 5 μg/ml purified bispecific single chain construct or cell culture supernatant of transfected cells expressing the cross-species specific bispecific antibody constructs. The filled histograms reflect the negative controls. Supernatant of untransfected CHO cells was used as negative control. For each cross-species specific bispecific single chain construct the overlay of the histograms shows specific binding of the construct to human and macaque CD33 and human and macaque CD3.

[0313] FIG. 34

[0314] The diagrams show results of chromium release assays measuring cytotoxic activity induced by designated cross-species specific CD33 specific single chain constructs redirected to the indicated target cell lines. Effector cells were also used as indicated. The assays are performed as described in Example 23.5. The diagrams clearly demonstrate for each construct the potent recruitment of cytotoxic activity of human and macaque effector cells against human and macaque CD33 transfected CHO cells, respectively.

[0315] FIG. 35

[0316] FACS binding analysis of designated cross-species specific bispecific single chain constructs to CHO cells transfected with human CAIX, the human CD3+ T cell line HPB-ALL, CHO cells transfected with macaque CAIX and the macaque T cell line 4119 LnPx respectively. The FACS staining was performed as described in Example 24.5. The bold lines represent cells incubated with 2 μg/ml purified bispecific single chain construct. The filled histograms reflect the negative controls. Supernatant of untransfected CHO cells was used as negative control for binding to the T cell lines. A single chain construct with irrelevant target specificity was used as negative control for binding to the CAIX transfected CHO cells. For each cross-species specific bispecific single chain construct the overlay of the histograms shows specific binding of the construct to human and macaque CAIX and human and macaque CD3.

[0317] FIG. 36

[0318] The diagrams show results of chromium release assays measuring cytotoxic activity induced by designated cross-species specific CAIX specific single chain constructs redirected to the indicated target cell lines. Effector cells were also used as indicated. The assays are performed as described in Example 24.6. The diagrams clearly demonstrate for each construct the potent recruitment of cytotoxic activity of human and macaque effector cells against human and macaque CAIX transfected CHO cells respectively.

[0319] FIG. 37

[0320] Cytotoxic activity induced by designated EpCAM specific single chain constructs against human EpCAM transfected CHO cells using human T cells as effector cells. The assay was performed as described in the example section. The diagrams clearly demonstrate potent recruitment of cytotoxic activity by each construct.

[0321] Effector cells: stimulated CD4/CD56 depleted human PBMC.

[0322] Target cells: CHO transfected with human EpCAM.

[0323] FIG. 38

[0324] FACS binding analysis of designated bispecific single chain constructs to CHO cells transfected with human EpCAM (2a), untransfected CHO cells as EpCAM and CD3 negative cell line (2b), human PBMCs (2c) and the macaque T cell line 4119 LnPx (2d) respectively. Cells were incubated with supernatant containing the respective bispecific single chain construct. The FACS staining is performed as described in the example section. For each cross-species specific bispecific single chain construct the overlay of the histograms shows specific binding of the construct to human EpCAM and human and macaque CD3.

[0325] a: CHO-EpCAM (human)

[0326] b: CHO (untransfected)

[0327] c: human PBMCs

[0328] d: macaque 4119LnPx (CD3+).

[0329] FIG. 39

[0330] FACS binding analysis of designated cross-species specific bispecific single chain constructs to CHO cells transfected with the human EGFRvIII, human CD3+ T cell line HPB-ALL, CHO cells transfected with cynomolgus EGFRvIII and a macaque T cell line 4119 LnPx. The FACS staining is performed as described in Example 26.3. The thick line represents cells incubated with 2 μg/ml purified monomeric protein that are subsequently incubated with the anti-his antibody and the PE labeled detection antibody. The thin histogram line reflects the negative control: cells only incubated with the anti-his antibody and the detection antibody.

[0331] FIG. 40

[0332] Cytotoxic activity induced by designated cross-species specific single chain constructs redirected to indicated target cell lines. A) Stimulated CD4-/CD56-human

[0333] PBMCs are used as effector cells, CHO cells transfected with human EGFRvIII as target cells. B) The macaque T cell line 4119 LnPx are used as effector cells, CHO cells transfected with cynomolgus EGFRvIII as target cells. The assay is performed as described in Example 26.3.

[0334] FIG. 41

[0335] FACS binding analysis of designated cross-species specific bispecific single chain constructs to J558L cells transfected with human IgE, human CD3+ T cell line HPB-ALL, J558L cells transfected with macaque IgE and a macaque T cell line 4119 LnPx. The FACS staining is performed as described in Example 27.2. The thick line represents cells incubated with cell culture supernatant of CHO cells transfected with designated cross-species specific bispecific single chain construct that are subsequently incubated with the anti-his antibody and the PE labeled detection antibody. The thin histogram line reflects the negative control: cells only incubated with the anti-his antibody and the detection antibody.

[0336] FIG. 42

[0337] Cytotoxic activity induced by designated cross-species specific single chain constructs redirected to indicated target cell lines. A) Stimulated CD4-/CD56-human PBMCs are used as effector cells, J558L cells transfected with human IgE as target cells. B) The macaque T cell line 4119 LnPx are used as effector cells, J558L cells transfected with macaque IgE as target cells. The assay is performed as described in Example 27.2.

[0338] FIG. 43

[0339] FACS binding analysis of designated cross-species specific bispecific single chain constructs to CHO cells transfected with human CD44, the human CD3+ T cell line HPB-ALL, CHO cells transfected with macaque CD44 and macaque PBMC respectively. The FACS staining was performed as described in Example 28.6. The bold lines represent cells incubated with 5 μg/ml purified bispecific single chain construct. The filled histograms reflect the negative controls. PBS with 2% FCS was used as negative control. For each cross-species specific bispecific single chain construct the overlay of the histograms shows specific binding of the construct to human and macaque CD44 and human and macaque CD3.

[0340] FIG. 44

[0341] FACS binding analysis of designated cross-species specific bispecific single chain constructs to CHO cells transfected with human CD44 lacking the v6 exon. The FACS staining is performed as described in Example 28.6. As control for expression of CD44 the CHO cells transfected with human CD44 lacking the v6 exon and the CHO cells transfected with the full length human CD44 were incubated with a anti-CD44 antibody. The bold lines represent cells incubated with 5 μg/ml purified bispecific single chain construct or the anti-CD44 antibody (5 μg/ml) as indicated. The filled histograms reflect the negative controls. PBS with 2% FCS was used as negative control. For each cross-species specific bispecific single chain construct the overlay of the histograms shows lack of binding of the construct to human CD44 lacking the v6 exon. Presence of CD44 on the CHO cells transfected with human CD44 lacking the v6 exon was demonstrated by comparable binding of the anti-CD44 antibody to these cells and to the cells transfected with full length human CD44. FACS binding analysis showed the specificity of the cross-species specific bispecific single chain constructs for the v6 exon of CD44.

[0342] FIG. 45

[0343] The diagram shows results of a chromium release assay measuring cytotoxic activity induced by designated cross-species specific CD44 specific single chain constructs redirected to CHO cells transfected with human CD44 as described in Example 28.1. As effector cells stimulated human PBMC depleted for CD4 and CD56 were used with an E:T ratio of 10:1. The assay is performed as described in Example 28.7. The diagram demonstrated for each construct the potent recruitment of cytotoxic activity of human effector cells against human CD44 transfected CHO cells.

[0344] FIG. 46

[0345] FACS binding analysis of designated cross-species specific bispecific single chain constructs to CHO cells transfected with human CD30, the human CD30+ B cell line MEC-1, the human CD3+ T cell line HPB-ALL, CHO cells transfected with macaque

[0346] CD30 and macaque PBMC respectively. The FACS staining was performed as described in Example 29.5. The bold lines represent cells incubated with 5 μg/ml purified bispecific single chain construct. The filled histograms reflect the negative controls. PBS with 2% FCS was used as negative control. For each cross-species specific bispecific single chain construct the overlay of the histograms shows specific binding of the construct to human and macaque CD30 and human and macaque CD3.

[0347] FIG. 47

[0348] The diagrams show results of chromium release assays measuring cytotoxic activity induced by designated cross-species specific CD30 specific single chain constructs redirected to the indicated target cell lines. Effector cells were also used as indicated. The assays were performed as described in Example 29.6. The diagrams clearly demonstrate for each construct the potent recruitment of cytotoxic activity of human and macaque effector cells against cells positive for human and macaque CD30, respectively.

[0349] FIG. 48

[0350] FACS binding analysis of designated cross-species specific bispecific single chain constructs to CHO cells transfected with human HER2, the human CD3+ T cell line HPB-ALL, CHO cells transfected with macaque HER2 and the macaque T cell line 4119LnPx respectively. The FACS staining was performed as described in Example 30.5. The bold lines represent cells incubated with 2 μg/ml purified bispecific single chain construct. The thin lines reflect the negative controls. PBS with 2% FCS was used as negative control. For each cross-species specific bispecific single chain construct the overlay of the histograms shows specific binding of the construct to human and macaque HER2 and human and macaque CD3.

[0351] FIG. 49

[0352] The diagrams show results of chromium release assays measuring cytotoxic activity induced by designated cross-species specific HER2 specific single chain constructs redirected to the indicated target cell lines. Effector cells were also used as indicated. The assays were performed as described in Example 30.6. The diagrams clearly demonstrate for each construct shown the potent recruitment of cytotoxic activity of human and macaque effector cells against human and macaque HER2 transfected CHO cells, respectively.

[0353] FIG. 50

[0354] SDS PAGE gel and Western blot monitoring the purification of the cross-species specific bispecific single chain molecule designated E292F3 HL×I2C HL. Samples from the eluate, the cell culture supernatant (SN) and the flow through of the column (FT) were analyzed as indicated. A protein marker (M) was applied as size reference. A strong protein band with a molecular weight between 50 and 60 kDa in the SDS PAGE gel demonstrates the efficient purification of the cross-species specific bispecific single chain molecule to a very high degree of purity with the one-step purification method described in Example 31.2. The Western blot detecting the histidine₆ tag confirms the identity of the protein band in the eluate as the cross-species specific bispecific single chain molecule. The faint signal for the flow through sample in this sensitive detection method further shows the nearly complete capture of bispecific single chain molecules by the purification method.

[0355] FIG. 51

[0356] SDS PAGE gel and Western blot monitoring the purification of the cross-species specific bispecific single chain molecule designated V207C12 HL×H2C HL. Samples from the eluate, the cell culture supernatant (SN) and the flow through of the column (FT) were analyzed as indicated. A protein marker (M) was applied as size reference. A strong protein band with a molecular weight between 50 and 60 kDa in the SDS PAGE gel demonstrates the efficient purification of the cross-species specific bispecific single chain molecule to a very high degree of purity with the one-step purification method described in Example 31.2. The Western blot detecting the histidine₆ tag confirms the identity of the protein band in the eluate as the cross-species specific bispecific single chain molecule. The faint signal for the flow through sample in this sensitive detection method further shows the nearly complete capture of bispecific single chain molecules by the purification method.

[0357] FIG. 52

[0358] SDS PAGE gel and Western blot monitoring the purification of the cross-species specific bispecific single chain molecule designated AF5HL×F12QHL. Samples from the eluate, the cell culture supernatant (SN) and the flow through of the column (FT) were analyzed as indicated. A protein marker (M) was applied as size reference. A strong protein band with a molecular weight between 50 and 60 kDa in the SDS PAGE gel demonstrates the efficient purification of the cross-species specific bispecific single chain molecule to a very high degree of purity with the one-step purification method described in Example 31.2. The Western blot detecting the histidine₆ tag confirms the identity of the protein band in the eluate as the cross-species specific bispecific single chain molecule. The signal in the flow through sample in this sensitive detection method is explained by saturation of the affinity column due to the high concentration of bispecific single chain molecules in the supernatant.

[0359] FIG. 53

[0360] Standard curve of AF5HL×I2CHL in 50% macaque monkey serum. The upper diagram shows the standard curve generated for the assay as described in Example 32.2.

[0361] The lower diagram shows results for quality control samples of AF5HL×I2CHL in 50% macaque monkey serum. The recovery rates are above 90% for the high and mid QC sample and above 80% for the low QC sample.

[0362] Thus the assay allows for detection of AF5HL×I2CHL in serum samples in the range from 10 ng/ml to 200 ng/ml (before dilution).

[0363] FIG. 54

[0364] Standard curve of MCSP-G4 HL×I2C HL in 50% macaque monkey serum. The upper diagram shows the standard curve generated for the assay as described in Example 32.2.

[0365] The lower diagram shows results for quality control samples of MCSP-G4 HL×I2C HL in 50% macaque monkey serum. The recovery rates are above 98% for the high and mid QC sample and above 85% for the low QC sample.

[0366] Thus the assay allows for detection of MCSP-G4 HL×I2C HL in serum samples in the range from 10 ng/ml to 200 ng/ml (before dilution).

[0367] FIG. 55

[0368] FACS binding analysis of an anti-Flag antibody to CHO cells transfected with the 1-27 N-terminal amino acids of CD3 epsilon of the designated species fused to cynomolgus EpCAM. The FACS staining was performed as described in Example 33.1. The bold lines represent cells incubated with the anti-Flag antibody. The filled histograms reflect the negative controls. PBS with 2% FCS was used as negative control. The histograms show strong and comparable binding of the anti-Flag antibody to all transfectants indicating strong and equal expression of the transfected constructs.

[0369] FIG. 56

[0370] FACS binding analysis of the I2C IgG1 construct to CHO cells expressing the 1-27 N-terminal amino acids of CD3 epsilon of the designated species fused to cynomolgus EpCAM. The FACS staining is performed as described in Example 33.3. The bold lines represent cells incubated with 50 μl cell culture supernatant of cells expressing the I2C IgG1 construct. The filled histograms reflect the negative control. Cells expressing the 1-27 N-terminal amino acids of CD3 epsilon of swine fused to cynomolgus EpCAM were used as negative control. In comparison with the negative control the histograms clearly demonstrate binding of the l2C IgG1 construct to 1-27 N-terminal amino acids of CD3 epsilon of human, marmoset, tamarin and squirrel monkey.

[0371] FIG. 57

[0372] FACS binding analysis of the I2C IgG1 construct as described in Example 33.2 to human CD3 with and without N-terminal His6 tag as described in Examples 6.1 and 5.1 respectively. The bold lines represent cells incubated with the anti-human CD3 antibody UCHT-1, the penta-His antibody (Qiagen) and cell culture supernatant of cells expressing the I2C IgG1 construct respectively as indicated. The filled histograms reflect cells incubated with an irrelevant murine IgG1 antibody as negative control.

[0373] The upper two histogram overlays show comparable binding of the UCHT-1 antibody to both transfectants as compared to the isotype control demonstrating expression of both recombinant constructs. The centre histogram overlays show binding of the penta his antibody to the cells expressing the His6-human CD3 epsilon chain (His6-CD3) but not to the cells expressing the wild-type CD3 epsilon chain (WT-CD3). The lower Histogram overlays show binding of the I2C IgG1 construct to the wild-type human CD3 epsilon chain but not to the His6-human CD3 epsilon chain. These results demonstrate that a free N-terminus is essential for binding of the cross-species specific anti-CD3 binding molecule I2C to the CD3 epsilon chain.

[0374] FIG. 58

[0375] FACS binding analysis of designated cross-species specific bispecific single chain constructs to CHO cells transfected with human MCSP D3, the human CD3+ T cell line HPB-ALL, CHO cells transfected with macaque MCSP D3 and the macaque T cell line 4119 LnPx respectively. The FACS staining was performed as described in Example 17. The bold lines represents cells incubated with 2 μg/ml purified bispecific single chain construct or cell supernatant containing the bispecific single chain construct respectively. The filled histograms reflect the negative controls. Supernatant of untransfected CHO cells was used as negative control for binding to the T cell lines. A single chain construct with irrelevant target specificity was used as negative control for binding to the MCSP D3 transfected CHO cells. For each cross-species specific bispecific single chain construct the overlay of the histograms shows specific binding of the construct to human and macaque MCSP D3 and human and macaque CD3.

[0376] FIG. 59

[0377] Cytotoxic activity induced by designated cross-species specific MCSP D3 specific single chain constructs redirected to the indicated target cell lines. Effector cells and effector to target ratio were also used as indicated. The assay is performed as described in Example 18. The diagrams clearly demonstrate potent cross-species specific recruitment of cytotoxic activity by each construct.

[0378] FIG. 60

[0379] FACS binding analysis of designated cross-species specific bispecific single chain constructs to CHO cells transfected with human CD33, the human CD3+ T cell line HPB-ALL, CHO cells transfected with macaque CD33 and macaque PBMC respectively. The FACS staining was performed as described in Example 36.2. The bold lines represent cells incubated with cell culture supernatant of transfected cells expressing the cross-species specific bispecific antibody constructs. The filled histograms reflect the negative controls. Supernatant of untransfected CHO cells was used as negative control. For each cross-species specific bispecific single chain construct the overlay of the histograms shows specific binding of the construct to human and macaque CD33 and human and macaque CD3.

[0380] FIG. 61

[0381] The diagrams show results of chromium release assays measuring cytotoxic activity induced by designated cross-species specific CD33 specific single chain constructs redirected to the indicated target cell lines. Effector cells were also used as indicated. The assays are performed as described in Example 36.3. The diagrams clearly demonstrate for each construct the potent recruitment of cytotoxic activity of human and macaque effector cells against human and macaque CD33 transfected CHO cells, respectively.

[0382] FIG. 62

[0383] T cell redistribution in a chimpanzee under weekly intravenous bolus infusion with PBS/5% HSA and PBS/5% HSA plus single-chain EpCAM/CD3-bispecific antibody construct at doses of 1.6, 2.0, 3.0 and 4.5 μg/kg. The infusion time for each bolus administration was 2 hours. Vertical arrows indicate the start of bolus infusions. Data points at the beginning of each bolus administration show the T cell counts immediately prior to start of bolus infusion. Each bolus infusion of the single-chain EpCAM/CD3-bispecific antibody construct, which recognizes a conventional context dependent CD3 epitope, triggered an episode of T cell redistribution followed by recovery of T cells to baseline values prior to the next bolus infusion.

[0384] FIG. 63

[0385] CD3 specific ELISA analysis of periplasmic preparations containing Flag tagged scFv protein fragments from selected clones. Periplasmic preparations of soluble scFv protein fragments were added to wells of an ELISA plate, which had been coated with soluble human CD3 epsilon (aa 1-27)-Fc fusion protein and had been additionally blocked with PBS 3% BSA. Detection was performed by a monoclonal anti Flag-Biotin-labeled antibody followed by peroxidase-conjugated Streptavidin. The ELISA was developed by an ABTS substrate solution. The OD values (y axis) Were measured at 405 nm by an ELISA reader. Clone names are presented on the x axis.

[0386] FIG. 64

[0387] ELISA analysis of periplasmic preparations containing Flag tagged scFv protein fragments from selected clones. The same periplasmic preparations of soluble scFv protein fragments as in FIG. 63 were added to wells of an ELISA plate which had not been coated with human CD3 epsilon (aa 1-27)-Fc fusion protein but with hulgG1 (Sigma) and blocked with 3% BSA in PBS.

[0388] Detection was performed by a monoclonal anti Flag-Biotin-labeled antibody followed by peroxidase-conjugated Streptavidin. The ELISA was developed by an ABTS substrate solution. The OD values (y axis) were measured at 405 nm by an ELISA reader. Clone names are presented on the x axis.

[0389] FIG. 65

[0390] FACS binding analysis of designated cross-species specific bispecific single chain constructs to CHO cells transfected with human CD44, the human CD3+ T cell line HPB-ALL, CHO cells transfected with macaque CD44 and the macaque T cell line 4119 LnPx respectively. CHO cells transfected with human CD44delv6 were used as control to emphasize the specificity of designated cross-species specific bispecific single chain constructs to CD44. The FACS staining is performed as described in Example 39.3. The bold lines represent cells incubated with cell supernatant containing the bispecific single chain construct. The filled histograms reflect the negative controls. Supernatant of untransfected CHO cells was used as negative control for binding to the T cell lines. A single chain construct with irrelevant target specificity was used as negative control for binding to the CD44 and CD44delv6 transfected CHO cells. For each cross-species specific bispecific single chain construct the overlay of the histograms shows specific binding of the construct to human and macaque CD44 and human and macaque CD3. The overlay of the histograms for each construct shows no specific binding to the human CD44delv6 transfected CHO cells.

[0391] FIG. 66

[0392] Cytotoxic activity induced by designated cross-species specific CD44 specific single chain constructs redirected to the indicated target cell lines. Effector cells and effector to target ratio were also used as indicated. The assay is performed as described in Example 39.4. The diagrams clearly demonstrate the potency of mediating cytotoxicity by each of the bispecific constructs.

[0393] FIG. 67

[0394] FACS binding analysis of designated cross-species specific bispecific single chain constructs as described in example 41.

[0395] FIG. 68

[0396] Cytotoxic activity induced by designated cross-species specific binding molecules as described in example 41.

[0397] The present invention is additionally described by way of the following illustrative non-limiting examples that provide a better understanding of the present invention and of its many advantages.

### EXAMPLES

[0398] 1. Identification of CD3epsilon Sequences from Blood Samples of Non-Human Primates

[0399] Blood samples of the following non-human primates were used for CD3epsilon-identification: Callithrix jacchus, Saguinus oedipus and Saimiris ciureus. Fresh heparin-treated whole blood samples were prepared ⁻for isolating total cellular RNA according to manufacturer's protocol (QIAamp RNA Blood Mini Kit, Qiagen). The extracted mRNA was transcribed into cDNA according to published protocols. In brief, 10 μl of precipitated RNA was incubated with 1.2 μl of 10× hexanucleotide mix (Roche) at 70° C. for 10 minutes and stored on ice. A reaction mix consisting of 4 μl of 5× superscript II buffer, 0.2 μl of 0.1M dithiothreitole, 0.8 μl of superscript II (Invitrogen), 1.2 μl of desoxyribonucleoside triphosphates (25 μM), 0.8 μl of RNase Inhibitor (Roche) and 1.8 μl of DNase and RNase free water (Roth) was added. The reaction mix was incubated at room temperature for 10 minutes followed by incubation at 42° C. for 50 minutes and at 90° C. for 5 minutes. The reaction was cooled on ice before adding 0.8 μl of RNaseH (1 U/μl, Roche) and incubated for 20 minutes at 37° C.

[0400] The first-strand cDNAs from each species were subjected to separate 35-cycle polymerase chain reactions using Taq DNA polymerase (Sigma) and the following primer combination designed on database research: forward primer 5′-AGAGTTCTGGGCCTCTGC-3′ (SEQ ID NO: 377); reverse primer 5′-CGGATGGGCTCATAGTCTG-3′ (SEQ ID NO: 378);. The amplified 550 bp-bands were gel purified (Gel Extraction Kit, Qiagen) and sequenced (Sequiserve, Vaterstetten/Germany, see sequence listing).

CD3epsilon Callithrix jacchus
Nucleotides
CAGGACGGTAATGAAGAAATGGGTGATACTACACAGAACCCATATAAAGT
TTCCATCTCAGGAACCACAGTAACACTGACATGCCCTCGGTATGATGGAC
ATGAAATAAAATGGCTCGTAAATAGTCAAAACAAAGAAGGTCATGAGGAC
CACCTGTTACTGGAGGACTTTTCGGAAATGGAGCAAAGTGGTTATTATGC
CTGCCTCTCCAAAGAGACTCCCGCAGAAGAGGCGAGCCATTATCTCTACC
TGAAGGCAAGAGTGTGTGAGAACTGCGTGGAGGTGGAT
Amino acids
QDGNEEMGDTTQNPYKVSTSGTTVTLTCPRYDGHEIKWLVNSQNKEGHED
HLLLEDFSEMEQSGYYACLSKETPAEEASHYLYLKARVCENCVEVD
CD3epsilon Saguinus oedipus
Nucleotides
CAGGACGGTAATGAAGAAATGGGTGATACTACACAGAACCCATATAAAGT
TTCCATCTCAGGAACCACAGTAACACTGACATGCCCTCGGTATGATGGAC
ATGAAATAAAATGGCTTGTAAATAGTCAAAACAAAGAAGGTCATGAGGAC
CACCTGTTACTGGAGGATTTTTCGGAAATGGAGCAAAGTGGTTATTATGC
CTGCCTCTCCAAAGAGACTCCCGCAGAAGAGGCGAGCCATTATCTCTACC
TGAAGGCAAGAGTGTGTGAGAACTGCGTGGAGGTGGAT
Amino acids
QDGNEEMGDTTQNPYKVSISGTTVTLTCPRYDGHEIKWLVNSQNKEGHED
HLLLEDFSEMEQSGYYACLSKETPAEEASHYLYLKARVCENCVEVD
CD3epsilon Saimiris ciureus
Nucleotides
CAGGACGGTAATGAAGAGATTGGTGATACTACCCAGAACCCATATAAAGT
TTCCATCTCAGGAACCACAGTAACACTGACATGCCCTCGGTATGATGGAC
AGGAAATAAAATGGCTCGTAAATGATCAAAACAAAGAAGGTCATGAGGAC
CACCTGTTACTGGAAGATTTTTCAGAAATGGAACAAAGTGGTTATTATGC
CTGCCTCTCCAAAGAGACCCCCACAGAAGAGGCGAGCCATTATCTCTACC
TGAAGGCAAGAGTGTGTGAGAACTGCGTGGAGGTGGAT
Amino acids
QDGNEEIGDTTQNPYKVSISGTTVTLTCPRYDGQEIKWLVNDQNKEGHED
HLLLEDFSEMEQSGYYACLSKETPTEEASHYLYLKARVCENCVEVD

2. Generation of Cross-Species Specific Single Chain Antibody Fragments (scFv) Binding to the N-Terminal Amino Acids 1-27 of CD3epsilon of Man and Different Non-Chimpanzee Primates
2.1. Immunization of Mice Using the N-Terminus of CD3epsilon Separated from its Native CD3-Context by Fusion to a Heterologous Soluble Protein

[0401] Ten weeks old F1 mice from balb/c×C57black crossings were immunized with the CD3epsilon-Fc fusion protein carrying themost N-terminal amino acids 1-27 of the mature CD3epsilon chain (1-27 CD3-Fc) of man and/or saimiris ciureus. To this end 40 μg of the 1-27 CD3-Fc fusion protein with 10 nmol of a thioate-modified CpG-Oligonucleotide (5′-tccatgacgttcctgatgct-3′) in 300 ul PBS were injected per mouse intra-peritoneally. Mice receive booster immunizations after 21, 42 and optionally 63 days in the same way. Ten days after the first booster immunization, blood samples were taken and antibody serum titer against 1-27 CD3-Fc fusion protein iwa tested by ELISA. Additionally, the titer against the CD3-positive human T cell line HPBaII was tested in flow cytometry according to standard protocols. Serum titers were significantly higher in immunized than in non-immunized animals.

2.2. Generation of an Immune Murine Antibody scFv Library: Construction of a Combinatorial Antibody Library and Phage Display

[0402] Three days after the last injection the murine spleen cells were harvested for the preparation of total RNA according to standard protocols.

[0403] A library of murine immunoglobuline (Ig) light chain (kappa) variable region (VK) and Ig heavy chain variable region (VH) DNA-fragments was constructed by RT-PCR on murine spleen RNA using VK- and VH specific primer. cDNA was synthesized according to standard protocols.

[0404] The primers were designed in a way to give rise to a 5′-XhoI and a 3′-BstEII recognition site for the amplified heavy chain V-fragments and to a 5′-Sacl and a 3′-Spel recognition site for amplified VK DNA fragments.

[0405] For the PCR-amplification of the VH DNA-fragments eight different 5′-VH-family specific primers (MVH1(GC)AG GTG CAG CTC GAG GAG TCA GGA CCT; MVH2 GAG GTC CAG CTC GAG CAG TCT GGA CCT; MVH3 CAG GTC CAA CTC GAG CAG CCT GGG GCT; MVH4 GAG GTT CAG CTC GAG CAG TCT GGG GCA; MVH5 GA(AG) GTG AAG CTC GAG GAG TCT GGA GGA; MVH6 GAG GTG AAG CTT CTC GAG TCT GGA GGT; MVH7 GAA GTG AAG CTC GAG GAG TCT CGG GGA; MVH8 GAG GTT CAG CTC GAG CAG TCT GGA GCT) were each combined with one 3′-VH primer (3′MuVHBstEII tga gga gac ggt gac cgt ggt ccc ttg gcc cca g); for the PCR amplification of the VK-chain fragments seven different 5′-VK-family specific primers (MUVK1 CCA GTT CCG AGC TCG TTG TGA CTC AGG AAT CT; MUVK2 CCA GTT CCG AGC TCG TGT TGA CGC AGC CGC CC; MUVK3 CCA GTT CCG AGC TCG TGC TCA CCC AGT CTC CA; MUVK4 CCA GTT CCG AGC TCC AGA TGA CCC AGT CTC CA; MUVK5 CCA GAT GTG AGC TCG TGA TGA CCC AGA CTC CA; MUVK6 CCA GAT GTG AGC TCG TCA TGA CCC AGT CTC CA; MUVK7 CCA GTT CCG AGC TCG TGA TGA CAC AGT CTC CA) were each combined with one 3′-VK primer (3′MuVkHindIII/BsiW1 tgg tgc act agt cgt acg ttt gat ctc aag ctt ggt ccc).

[0406] The following PCR program was used for amplification: denaturation at 94° C. for 20 sec; primer annealing at 52° C. for 50 sec and primer extension at 72° C. for 60 sec and 40 cycles, followed by a 10 min final extension at 72° C.

[0407] 450 ng of the kappa light chain fragments (Sacl-Spel digested) were ligated with 1400 ng of the phagemid pComb3H5Bhis (Sacl-Spel digested; large fragment). The resulting combinatorial antibody library was then transformed into 300 ul of electrocompetent Escherichia coli XL1 Blue cells by electroporation (2.5 kV, 0.2 cm gap cuvette, 25 uFD, 200 Ohm, Biorad gene-pulser) resulting in a library size of more than 10⁷ independent clones. After one hour of phenotype expression, positive transformants were selected for carbenicilline resistance encoded by the pComb3H5BHis vector in 100 ml of liquid super broth (SB)-culture over night. Cells were then harvested by centrifugation and plasmid preparation was carried out using a commercially available plasmid preparation kit (Qiagen).

[0408] 2800 ng of this plasmid-DNA containing the VK-library (XhoI-BstEII digested; large fragment) were ligated with 900 ng of the heavy chain V-fragments (XhoI-BstEII digested) and again transformed into two 300 ul aliquots of electrocompetent E. coli XL1 Blue cells by electroporation (2.5 kV, 0.2 cm gap cuvette, 25 uFD, 200 Ohm) resulting in a total VH-VK scFv (single chain variable fragment) library size of more than 10⁷ independent clones.

[0409] After phenotype expression and slow adaptation to carbenicillin, the E. coli cells containing the antibody library were transferred into SB-Carbenicillin (50 ug/mL) selection medium. The E. coli cells containing the antibody library was then infected with an infectious dose of 10¹² particles of helper phage VCSM13 resulting in the production and secretion of filamentous M13 phage, wherein phage particle contains single stranded pComb3H5BHis-DNA encoding a murine scFv-fragment and displayed the corresponding scFv-protein as a translational fusion to phage coat protein III. This pool of phages displaying the antibody library was later used for the selection of antigen binding entities.

[0410] 2.3. Phage Display Based Selection of CD3-Specific Binders

[0411] The phage library carrying the cloned scFv-repertoire was harvested from the respective culture supernatant by PEG8000/NaCl precipitation and centrifugation. Approximately 10¹¹ to 10¹² scFv phage particles were resuspended in 0.4 ml of PBS/0.1% BSA and incubated with 10⁵ to 10⁷ Jurkat cells (a CD3-positive human T-cell line) for 1 hour on ice under slow agitation. These Jurkat cells were grown beforehand in RPMI medium enriched with fetal calf serum (10%), glutamine and penicillin/streptomycin, harvested by centrifugation, washed in PBS and resuspended in PBS/1% FCS (containing Na Azide). scFv phage which do not specifically bind to the Jurkat cells were eliminated by up to five washing steps with PBS/1% FCS (containing Na Azide). After washing, binding entities were eluted from the cells by resuspending the cells in HCl-glycine pH 2.2 (10 min incubation with subsequent vortexing) and after neutralization with 2 M Tris pH 12, the eluate was used for infection of a fresh uninfected E. coli XL1 Blue culture (OD600>0.5). The E. coli culture containing E. coli cells successfully transduced with a phagemid copy, encoding a human scFv-fragment, were again selected for carbenicillin resistance and subsequently infected with VCMS 13 helper phage to start the second round of antibody display and in vitro selection. A total of 4 to 5 rounds of selections were carried out, normally.

[0412] 2.4. Screening for CD3-Specific Binders

[0413] Plasmid DNA corresponding to 4 and 5 rounds of panning was isolated from E. coli cultures after selection. For the production of soluble scFv-protein, VH-VL-DNA fragments were excised from the plasmids (XhoI-Spel). These fragments were cloned via the same restriction sites in the plasmid pComb3H5BFlag/His differing from the original pComb3H5BHis in that the expression construct (e.g. scFv) includes a Flag-tag (TGD YKDDDDK) between the scFv and the His6-tag and the additional phage proteins were deleted. After ligation, each pool (different rounds of panning) of plasmid DNA was transformed into 100 μl heat shock competent E. coli TG1 or XLI blue and plated onto carbenicillin LB-agar. Single colonies were picked into 100 ul of LB carb (50 ug/ml).

[0414] E. coli transformed with pComb3H5BHis containing a VL- and VH-segment produce soluble scFv in sufficient amounts after excision of the gene III fragment and induction with 1 mM IPTG. Due to a suitable signal sequence, the scFv-chain was exported into the periplasma where it folds into a functional conformation.

[0415] Single E. coli TG1 bacterial colonies from the transformation plates were picked for periplasmic small scale preparations and grown in SB-medium (e.g. 10 ml) supplemented with 20 mM MgCl2 and carbenicillin 50 μg/ml (and re-dissolved in PBS (e.g. 1 ml) after harvesting. By four rounds of freezing at −70° C. and thawing at 37° C., the outer membrane of the bacteria was destroyed by temperature shock and the soluble periplasmic proteins including the scFvs were released into the supernatant. After elimination of intact cells and cell-debris by centrifugation, the supernatant containing the human anti-human CD3-scFvs was collected and used for further examination.

[0416] 2.5. Identification of CD3-Specific Binders

[0417] Binding of the isolated scFvs was tested by flow cytometry on eukaryotic cells, which on their surface express a heterologous protein displaying at its N-terminus the first 27 N-terminal amino acids of CD3epsilon.

[0418] As described in Example 4, the first amino acids 1-27 of the N-terminal sequence of the mature CD3 epsilon chain of the human T cell receptor complex (amino acid sequence: QDGNEEMGGITQTPYKVSISGTTVILT) were fused to the N-terminus of the transmembrane protein EpCAM so that the N-terminus was located at the outer cell surface. Additionally, a FLAG epitope was inserted between the N-terminal 1-27 CD3epsilon sequence and the EpCAM sequence. This fusion product was expressed in human embryonic kidney (HEK) and chinese hamster ovary (CHO) cells.

[0419] Eukaryotic cells displaying the 27 most N-terminal amino acids of mature CD3epsilon of other primate species were prepared in the same way for Saimiri ciureus (Squirrel monkey) (CD3epsilon N-terminal amino acid sequence: QDGNEEIGDTTQNPYKVSISGTTVTLT), for Callithrix jacchus (CD3epsilon N-terminal amino acid sequence: QDGNEEMGDTTQNPYKVSISGTTVTLT) and for Saguinus oedipus (CD3epsilon N-terminal amino acid sequence: QDGNEEMGDTTQNPYKVSISGTTVTLT).

[0420] For flow cytometry 2.5×10⁵ cells are incubated with 50 ul supernatant or with 5 μg/ml of the purified constructs in 50 μl PBS with 2% FCS. The binding of the constructs was detected with an anti-His antibody (Penta-His Antibody, BSA free, Qiagen GmbH, Hilden, FRG) at 2 μg/ml in 50 μl PBS with 2% FCS. As a second step reagent a R-Phycoerythrin-conjugated affinity purified F(ab′)2 fragment, goat anti-mouse IgG (Fc-gamma fragment specific), diluted 1:100 in 50 μl PBS with 2% FCS (Dianova, Hamburg, FRG) was used. The samples were measured on a FACSscan (BD biosciences, Heidelberg, FRG).

[0421] Binding was always confirmed by flow cytometry as described in the foregoing paragraph on primary T cells of man and different primates (e.g. saimiris ciureus, callithrix jacchus, saguinus oedipus).

[0422] 2.6. Generation of Human/Humanized Equivalents of Non-Human CD3epsilon Specific scFvs

[0423] The VH region of the murine anti-CD3 scFv was aligned against human antibody germline amino acid sequences. The human antibody germline VH sequence was chosen which has the closest homology to the non-human VH and a direct alignment of the two amino acid sequences was performed. There were a number of framework residues of the non-human VH that differ from the human VH framework regions (“different framework positions”). Some of these residues may contribute to the binding and activity of the antibody to its target.

[0424] To construct a library that contain the murine CDRs and at every framework position that differs from the chosen human VH sequence both possibilities (the human and the maternal murine amino acid residue), degenerated oligonucleotides were synthesized. These oligonucleotides incorporate at the differing positions the human residue with a probability of 75% and the murine residue with a probability of 25%. For one human VH e.g. six of these oligonucleotides had to be synthesized that overlap in a terminal stretch of approximately 20 nucleotides. To this end every second primer was an antisense primer. Restriction sites needed for later cloning within the oligonucleotides were deleted.

[0425] These primers may have a length of 60 to 90 nucleotides, depending on the number of primers that were needed to span over the whole V sequence.

[0426] These e.g. six primers were mixed in equal amounts (e.g. 1 μl of each primer (primer stocks 20 to 100 μM) to a 20 μl PCR reaction) and added to a PCR mix consisting of PCR buffer, nucleotides and Taq polymerase. This mix was incubated at 94° C. for 3 minutes, 65° C. for 1 minute, 62° C. for 1 minute, 59° C. for 1 minute, 56° C. for 1 minute, 52° C. for 1 minute, 50° C. for 1 minute and at 72° C. for 10 minutes in a PCR cycler. Subsequently the product was run in an agarose gel electrophoresis and the product of a size from 200 to 400 isolated from the gel according to standard methods.

[0427] This PCR product was then used as a template for a standard PCR reaction using primers that incorporate N-terminal and C-terminal suitable cloning restriction sites. The DNA fragment of the correct size (for a VH approximately 350 nucleotides) was isolated by agarose gel electrophoresis according to standard methods. In this way sufficient VH DNA fragment was amplified. This VH fragment was now a pool of VH fragments that have each one a different amount of human and murine residues at the respective differing framework positions (pool of humanized VH). The same procedure was performed for the VL region of the murine anti-CD3 scFv (pool of humanized VL).

[0428] The pool of humanized VH was then combined with the pool of humanized VL in the phage display vector pComb3H5Bhis to form a library of functional scFvs from which—after display on filamentous phage—anti-CD3 binders were selected, screened, identified and confirmed as described above for the parental non-human (murine) anti-CD3 scFv. Single clones were then analyzed for favorable properties and amino acid sequence. Those scFvs which were closest in amino acid sequence homology to human germline V-segments are preferred particularly those wherein at least one CDR among CDR I and II of VH and CDR I and II of VLkappa or CDR I and II of VLlambda shows more than 80% amino acid sequence identity to the closest respective CDR of all human germline V-segments. Anti-CD3 scFvs were converted into recombinant bispecific single chain antibodies as described in the following Examples 10 and 16 and further characterized.

[0429] 3. Generation of a Recombinant Fusion Protein of the N-Terminal Amino Acids 1-27 of the Human CD3 Epsilon Chain Fused to the Fc-Part of an IgG1 (1-27 CD3-Fc).

[0430] 3.1. Cloning and Expression of 1-27 CD3-Fc

[0431] The coding sequence of the 1-27 N-terminal amino acids of the human CD3 epsilon chain fused to the hinge and Fc gamma region of human immunoglobulin IgG1 as well as an 6 Histidine Tag were obtained by gene synthesis according to standard protocols (cDNA sequence and amino acid sequence of the recombinant fusion protein are listed under SEQ ID NOs 350 and 349). The gene synthesis fragment was designed as to contain first a Kozak site for eukaryotic expression of the construct, followed by an 19 amino acid immunoglobulin leader peptide, followed in frame by the coding sequence of the first 27 amino acids of the extracellular portion of the mature human CD3 epsilon chain, followed in frame by the coding sequence of the hinge region and Fc gamma portion of human IgG1, followed in frame by the coding sequence of a 6 Histidine tag and a stop codon (FIG. 1). The gene synthesis fragment was also designed as to introduce restriction sites at the beginning and at the end of the cDNA coding for the fusion protein. The introduced restriction sites, EcoRI at the 5′ end and SalI at the 3′ end, are utilized in the following cloning procedures. The gene synthesis fragment was cloned via EcoRI and SalI into a plasmid designated pEF-DHFR (pEF-DHFR is described in Mack et al. Proc. Natl. Acad. Sci. USA 92 (1995) 7021-7025) following standard protocols. A sequence verified plasmid was used for transfection in the FreeStyle 293 Expression System (Invitrogen GmbH, Karlsruhe, Germany) according to the manufacturers protocol. After 3 days cell culture supernatants of the transfectants were harvested and tested for the presence of the recombinant construct in an ELISA assay. Goat anti-human IgG, Fc-gamma fragment specific antibody (obtained from Jackson ImmunoResearch Europe Ltd., Newmarket, Suffolk, UK) was diluted in PBS to 5 μg/ml and coated with 100 μl per well onto a MaxiSorp 96-well ELISA plate (Nunc GmbH & Co. KG, Wiesbaden, Germany) over night at 4° C. Wells were washed with PBS with 0.05% Tween 20 (PBS/Tween and blocked with 3% BSA in PBS (bovine Albumin, fraction V, Sigma-Aldrich Chemie GmbH, Taufkirchen, Germany) for 60 minutes at room temperature (RT). Subsequently, wells were washed again PBS/Tween and then incubated with cell culture supernatants for 60 minutes at RT. After washing wells were incubated with a peroxidase conjugated anti-His6 antibody (Roche Diagnostics GmbH, Roche Applied Science, Mannheim, Germany) diluted 1:500 in PBS with 1% BSA for 60 minutes at RT. Subsequently, wells were washed with 200 μl PBS/Tween and 100 μl of the SIGMAFAST OPD (SIGMAFAST OPD [o-Phenylenediamine dihydrochloride] substrate solution (Sigma-Aldrich Chemie GmbH, Taufkirchen, Germany) was added according to the manufacturers protocol. The reaction was stopped by adding 100 μl 1 M H₂SO₄. Color reaction was measured on a PowerWaveX microplate spectrophotometer (BioTek Instruments, Inc., Winooski, Vt., USA) at 490 nm and subtraction of background absorption at 620 nm. As shown in FIG. 2 presence of the construct as compared to irrelevant supernatant of mock-transfected HEK 293 cells used as negative control was clearly detectable.

[0432] 3.2. Binding Assay of Cross-Species Specific Single Chain Antibodies to 1-27 CD3-Fc.

[0433] Binding of crude preparations of periplasmatically expressed cross-species specific single chain antibodies specific for CD3 epsilon to 1-27 CD3-Fc was tested in an ELISA assay. Goat anti-human IgG, Fc-gamma fragment specific antibody (Jackson ImmunoResearch Europe Ltd., Newmarket, Suffolk, UK) was diluted in PBS to 5 μg/ml and coated with 100 μl per well onto a MaxiSorp 96-well ELISA plate (Nunc GmbH & Co. KG, Wiesbaden, Germany) over night at 4° C. Wells were washed with PBS with 0.05% Tween 20 (PBS/Tween and blocked with PBS with 3% BSA (bovine Albumin, fraction V, Sigma-Aldrich Chemie GmbH, Taufkirchen, Germany) for 60 minutes at RT. Subsequently, wells were washed with PBS/Tween and incubated with supernatants of cells expressing the 1-27 CD3-Fc construct for 60 minutes at RT. Wells were washed with PBS/Tween and incubated with crude preparations of periplasmatically expressed cross-species specific single-chain antibodies as described above for 60 minutes at room temperature. After washing with PBS/Tween wells were incubated with peroxidase conjugated anti-Flag M2 antibody (Sigma-Aldrich Chemie GmbH, Taufkirchen, Germany) diluted 1:10000 in PBS with 1% BSA for 60 minutes at RT. Wells were washed with PBS/Tween and incubated with 100 μl of the SIGMAFAST OPD (OPD [o-Phenylenediamine dihydrochloride] substrate solution (Sigma-Aldrich Chemie GmbH, Taufkirchen, Germany) according to the manufacturers protocol. Color reaction was stopped with 100 μl 1 M H₂SO₄ and measured on a PowerWaveX microplate spectrophotometer (BioTek Instruments, Inc., Winooski, Vt., USA) at 490 nm and subtraction of background absorption at 620 nm. Strong binding of cross-species specific human single chain antibodies specific for CD3 epsilon to the 1-27 CD3-Fc construct compared to a murine anti CD3 single-chain antibody was observed (FIG. 3).

[0434] 4. Generation of Recombinant Transmembrane Fusion Proteins of the N-Terminal Amino Acids 1-27 of CD3 Epsilon from Different Non-Chimpanzee Primates Fused to EpCAM from Cynomolgus Monkey (1-27 CD3-EpCAM).

[0435] 4.1. Cloning and Expression of 1-27 CD3-EpCAM

[0436] CD3 epsilon was isolated from different non-chimpanzee primates (marmoset, tamarin, squirrel monkey) and swine. The coding sequences of the 1-27 N-terminal amino acids of CD3 epsilon chain of the mature human, common marmoset (Callithrix jacchus), cottontop tamarin (Saguinus oedipus), common squirrel monkey (Saimiri sciureus) and domestic swine (Sus scrofa; used as negative control) fused to the N-terminus of Flag tagged cynomolgus EpCAM were obtained by gene synthesis according to standard protocols. cDNA sequence and amino acid sequence of the recombinant fusion proteins are listed under SEQ ID NOs 351 to 360). The gene synthesis fragments were designed as to contain first a BsrGI site to allow fusion in correct reading frame with the coding sequence of a 19 amino acid immunoglobulin leader peptide already present in the target expression vector, which is followed in frame by the coding sequence of the N-terminal 1-27 amino acids of the extracellular portion of the mature CD3 epsilon chains, which is followed in frame by the coding sequence of a Flag tag and followed in frame by the coding sequence of the mature cynomolgus EpCAM transmembrane protein (FIG. 4). The gene synthesis fragments were also designed to introduce a restriction site at the end of the cDNA coding for the fusion protein. The introduced restriction sites BsrGI at the 5′ end and SalI at the 3′ end, were utilized in the following cloning procedures. The gene synthesis fragments were then cloned via BsrGI and SalI into a derivative of the plasmid designated pEF DHFR (pEF-DHFR is described in Mack et al. Proc. Natl. Acad. Sci. USA 92 (1995) 7021-7025), which already contained the coding sequence of the 19 amino acid immunoglobulin leader peptide following standard protocols. Sequence verified plasmids were used to transiently transfect 293-HEK cells using the MATra-A Reagent (IBA GmbH, Göttingen, Germany) and 12 μg of plasmid DNA for adherent 293-HEK cells in 175 ml cell culture flasks according to the manufacturers protocol. After 3 days of cell culture the transfectants were tested for cell surface expression of the recombinant transmembrane protein via an FACS assay according to standard protocols. For that purpose a number of 2.5×10⁵ cells were incubated with the anti-Flag M2 antibody (Sigma-Aldrich Chemie GmbH, Taufkirchen, Germany) at 5 μg/ml in PBS with 2% FCS. Bound antibody was detected with an R-Phycoerythrin-conjugated affinity purified F(ab′)2 fragment, goat anti-mouse IgG, Fc-gamma fragment specific 1:100 in PBS with 2% FCS (Jackson ImmunoResearch Europe Ltd., Newmarket, Suffolk, UK). The samples were measured on a FACScalibur (BD biosciences, Heidelberg, Germany). Expression of the Flag tagged recombinant transmembrane fusion proteins consisting of cynomolgus EpCAM and the 1-27 N-terminal amino acids of the human, marmoset, tamarin, squirrel monkey and swine CD3 epsilon chain respectively on transfected cells was clearly detectable (FIG. 5).

[0437] 4.2. Binding of Cross-Species Specific Anti-CD3 Single Chain Antibodies to the 1-27 CD3-EpCAM

[0438] Binding of crude preparations of periplasmatically expressed cross-species specific anti CD3 single-chain antibodies to the 1-27 N-terminal amino acids of the human, marmoset, tamarin and squirrel monkey CD3 epsilon chains respectively fused to cynomolgus Ep-CAM was tested in an FACS assay according to standard protocols. For that purpose a number of 2.5×10⁵ cells were incubated with crude preparations of periplasmatically expressed cross-species specific anti CD3 single-chain antibodies (preparation was performed as described above and according to standard protocols) and a single-chain murine anti-human CD3 antibody as negative control. As secondary antibody the Penta-His antibody (Qiagen GmbH, Hildesheim, Germany) was used at 5 μg/ml in 50 μl PBS with 2% FCS. The binding of the antibody was detected with an R-Phycoerythrin-conjugated affinity purified F(ab′)2 fragment, goat anti-mouse IgG, Fc-gamma fragment specific, diluted 1:100 in PBS with 2% FCS (Jackson ImmunoResearch Europe Ltd., Newmarket, Suffolk, UK). The samples were measured on a FACScalibur (BD biosciences, Heidelberg, Germany). As shown in FIGS. 6(A to E) binding of single chain antibodies to the transfectants expressing the recombinant transmembrane fusion proteins consisting of the 1-27 N-terminal amino acids of CD3 epsilon of the human, marmoset, tamarin or squirrel monkey fused to cynomolgus EpCAM was observed. No binding of cross-species specific single chain antibodies was observed to a fusion protein consisting of the 1-27 N-terminal CD3 epsilon of swine fused to cynomolgus EpCAM used as negative control. Multi-primate cross-species specificity of the anti-CD3 single chain antibodies was shown. Signals obtained with the anti Flag M2 antibody and the cross-species specific single chain antibodies were comparable, indicating a strong binding activity of the cross-species specific single chain antibodies to the N-terminal amino acids 1-27 of CD3 epsilon.

[0439] 5. Binding Analysis of Cross-Species Specific Anti-CD3 Single Chain Antibodies by Alanine-Scanning of Mouse Cells Transfected with the Human CD3 Epsilon Chain and its Alanine Mutants

[0440] 5.1. Cloning and Expression of Human Wild-Type CD3 Epsilon

[0441] The coding sequence of the human CD3 epsilon chain was obtained by gene synthesis according to standard protocols (cDNA sequence and amino acid sequence of the human CD3 epsilon chain are listed under SEQ ID NOs 362 and 361). The gene synthesis fragment was designed as to contain a Kozak site for eukaryotic expression of the construct and restriction sites at the beginning and the end of the cDNA coding for human CD3 epsilon. The introduced restriction sites EcoRI at the 5′ end and SalI at the 3′ end, were utilized in the following cloning procedures. The gene synthesis fragment was then cloned via EcoRI and SalI into a plasmid designated pEF NEO following standard protocols. pEF NEO was derived of pEF DHFR (Mack et al. Proc. Natl. Acad. Sci. USA 92 (1995) 7021-7025) by replacing the cDNA of the DHFR with the cDNA of the neomycin resistance by conventional molecular cloning. A sequence verified plasmid was used to transfect the murine T cell line EL4 (ATCC No. TIB-39) cultivated in RPMI with stabilized L-glutamine supplemented with 10% FCS, 1% penicillin/streptomycin, 1% HEPES, 1% pyruvate, 1% non-essential amino acids (all Biochrom AG Berlin, Germany) at 37° C., 95% humidity and 7% CO₂. Transfection was performed with the SuperFect Transfection Reagent (Qiagen GmbH, Hilden, Germany) and 2 μg of plasmid DNA according to the manufacturer's protocol. After 24 hours the cells were washed with PBS and cultivated again in the aforementioned cell culture medium with 600 μg/ml G418 for selection (PAA Laboratories GmbH, Pasching, Austria). 16 to 20 days after transfection the outgrowth of resistant cells was observed. After additional 7 to 14 days cells were tested for expression of human CD3 epsilon by FACS analysis according to standard protocols. 2.5×10⁵ cells were incubated with anti-human CD3 antibody UCHT-1 (BD biosciences, Heidelberg, Germany) at 5 μg/ml in PBS with 2% FCS. The binding of the antibody was detected with an R-Phycoerythrin-conjugated affinity purified F(ab′)2 fragment, goat anti-mouse IgG, Fc-gamma fragment specific, diluted 1:100 in PBS with 2% FCS (Jackson ImmunoResearch Europe Ltd., Newmarket, Suffolk, UK). The samples were measured on a FACSCalibur (BD biosciences, Heidelberg, Germany). Expression of human wild-type CD3 on transfected EL4 cells is shown in FIG. 7.

[0442] 5.2. Cloning and Expression of the Cross-Species Specific Anti-CD3 Single Chain Antibodies as IgG1 Antibodies

[0443] In order to provide improved means of detection of binding of the cross-species specific single chain anti-CD3 antibodies H2C HLP, A2J HLP and E2M HLP were converted into IgG1 antibodies with murine IgG1 and human lambda constant regions. cDNA sequences coding for the heavy and light chains of respective IgG antibodies were obtained by gene synthesis according to standard protocols. The gene synthesis fragments for each specificity were designed as to contain first a Kozak site to allow eukaryotic expression of the construct, which is followed by an 19 amino acid immunoglobulin leader peptide (SEQ ID NOs 364 and 363), which is followed in frame by the coding sequence of the respective heavy chain variable region or respective light chain variable region, followed in frame by the coding sequence of the heavy chain constant region of murine IgG1 (SEQ ID NOs 366 and 365) or the coding sequence of the human lambda light chain constant region (SEQ ID NO 368 and 367), respectively. Restriction sites were introduced at the beginning and the end of the cDNA coding for the fusion protein. Restriction sites EcoRI at the 5′ end and SalI at the 3′ end were used for the following cloning procedures. The gene synthesis fragments were cloned via EcoRI and SalI into a plasmid designated pEF DHFR (Mack et al. Proc. Natl. Acad. Sci. USA 92 (1995) 7021-7025) for the heavy chain constructs and pEF ADA (pEF ADA is described in Raum et al., Cancer Immunol Immunother., 50(3), (2001), 141-50) for the light chain constructs) according to standard protocols. Sequence verified plasmids were used for co-transfection of respective light and heavy chain constructs in the FreeStyle 293 Expression System (Invitrogen GmbH, Karlsruhe, Germany) according to the manufacturers protocol. After 3 days cell culture supernatants of the transfectants were harvested and used for the alanine-scanning experiment.

[0444] 5.3. Cloning and Expression of Alanine Mutants of Human CD3 Epsilon for Alanine-Scanning 27 cDNA fragments coding for the human CD3 epsilon chain with an exchange of one codon of the wild-type sequence of human CD3 epsilon into a codon coding for alanine (GCC) for each amino acid of amino acids 1-27 of the extracellular domain of the mature human CD3 epsilon chain respectively were obtained by gene synthesis. Except for the exchanged codon the cDNA fragments were identical to the aforementioned human wild-type CD3 cDNA fragment. Only one codon was replaced in each construct compared to the human wild-type CD3 cDNA fragment described above. Restriction sites EcoRI and SalI were introduced into the cDNA fragments at identical positions compared to the wild-type construct. All alanine-scanning constructs were cloned into pEF NEO and sequence verified plasmids were transfected into EL4 cells. Transfection and selection of transfectants was performed as described above. As result a panel of expressed constructs was obtained wherein the first amino acid of the human CD3 epsilon chain, glutamine (Q, Gln) at position 1 was replaced by alanine. The last amino acid replaced by alanine was the threonine (T, Thr) at position 27 of mature human wild-type CD3 epsilon. For each amino acid between glutamine 1 and threonine 27 respective transfectants with an exchange of the wild-type amino acid into alanine were generated.

[0445] 5.4. Alanine-Scanning Experiment

[0446] Chimeric IgG antibodies as described in 2) and cross-species specific single chain antibodies specific for CD3 epsilon were tested in alanine-scanning experiment. Binding of the antibodies to the EL4 cell lines transfected with the alanine-mutant constructs of human CD3 epsilon as described in 3) was tested by FACS assay according to standard protocols. 2.5×10⁵ cells of the respective transfectants were incubated with 50 μl of cell culture supernatant containing the chimeric IgG antibodies or with 50 μl of crude preparations of periplasmatically expressed single-chain antibodies. For samples incubated with crude preparations of periplasmatically expressed single-chain antibodies the anti-Flag M2 antibody (Sigma-Aldrich Chemie GmbH, Taufkirchen, Germany) was used as secondary antibody at 5 μg/ml in 50 μl PBS with 2% FCS. For samples incubated with the chimeric IgG antibodies a secondary antibody was not necessary. For all samples the binding of the antibody molecules was detected with an R-Phycoerythrin-conjugated affinity purified F(ab′)2 fragment, goat anti-mouse IgG, Fc-gamma fragment specific, diluted 1:100 in PBS with 2% FCS (Jackson ImmunoResearch Europe Ltd., Newmarket, Suffolk, UK). Samples were measured on a FACSCalibur (BD biosciences, Heidelberg, Germany). Differential binding of chimeric IgG molecules or cross-species specific single-chain antibodies to the EL4 cell lines transfected with the alanine-mutants of human CD3 epsilon was detected. As negative control either an isotype control or a crude preparation of a periplasmatically expressed single-chain antibody of irrelevant specificity was used respectively. UCHT-1 antibody was used as positive control for the expression level of the alanine-mutants of human CD3 epsilon. The EL4 cell lines transfected with the alanine-mutants for the amino acids tyrosine at position 15, valine at position 17, isoleucine at position 19, valine at position 24 or leucine at position 26 of the mature CD3 epsilon chain were not evaluated due to very low expression levels (data not shown). Binding of the cross-species specific single chain antibodies and the single chain antibodies in chimeric IgG format to the EL4 cell lines transfected with the alanine-mutants of human CD3 epsilon is shown in FIG. 8(A-D) as relative binding in arbitrary units with the geometric mean fluorescence values of the respective negative controls subtracted from all respective geometric mean fluorescence sample values. To compensate for different expression levels all sample values for a certain transfectant were then divided through the geometric mean fluorescence value of the UCHT-1 antibody for the respective transfectant. For comparison with the wild-type sample value of a specificity all sample values of the respective specificity were finally divided through the wild-type sample value, thereby setting the wild-type sample value to 1 arbitrary unit of binding.

[0447] The calculations used are shown in detail in the following formula:

$$value\_Sample ( x , y ) = \frac{Sample ( x , y ) - neg\_Contr . ( x )}{\begin{matrix}( UCHT - 1 ( x ) - neg\_Contr . ( x ) ) * \\ \frac{WT ( y ) - neg\_Contr . ( wt )}{UCHT - 1 ( wt ) - neg\_Contr . ( wt )}\end{matrix}}$$

[0448] In this equation value_Sample means the value in arbitrary units of binding depicting the degree of binding of a specific anti-CD3 antibody to a specific alanine-mutant as shown in FIG. 8(A-D), Sample means the geometric mean fluorescence value obtained for a specific anti-CD3 antibody assayed on a specific alanine-scanning transfectant, neg_Contr. means the geometric mean fluorescence value obtained for the negative control assayed on a specific alanine-mutant, UCHT-1 means the geometric mean fluorescence value obtained for the UCHT-1 antibody assayed on a specific alanine-mutant, WT means the geometric mean fluorescence value obtained for a specific anti-CD3 antibody assayed on the wild-type transfectant, x specifies the respective transfectant, y specifies the respective anti-CD3 antibody and wt specifies that the respective transfectant is the wild-type.

[0449] As can be seen in FIG. 8(A-D) the IgG antibody A2J HLP showed a pronounced loss of binding for the amino acids asparagine at position 4, threonine at position 23 and isoleucine at position 25 of the mature CD3 epsilon chain. A complete loss of binding of IgG antibody A2J HLP was observed for the amino acids glutamine at position 1, aspartate at position 2, glycine at position 3 and glutamate at position 5 of the mature CD3 epsilon chain. IgG antibody E2M HLP showed a pronounced loss of binding for the amino acids asparagine at position 4, threonine at position 23 and isoleucine at position 25 of the mature CD3 epsilon chain. IgG antibody E2M HLP showed a complete loss of binding for the amino acids glutamine at position 1, aspartate at position 2, glycine at position 3 and glutamate at position 5 of the mature CD3 epsilon chain. IgG antibody H2C HLP showed an intermediate loss of binding for the amino acid asparagine at position 4 of the mature CD3 epsilon chain and it showed a complete loss of binding for the amino acids glutamine at position 1, aspartate at position 2, glycine at position 3 and glutamate at position 5 of the mature CD3 epsilon chain. Single chain antibody F12Q HLP showed an essentially complete loss of binding for the amino acids glutamine at position 1, aspartate at position 2, glycine at position 3 of the mature CD3 epsilon chain and glutamate at position 5 of the mature CD3 epsilon chain.

[0450] 6. Binding Analysis of the Cross-Species Specific Anti-CD3 Binding Molecule H2C HLP to the Human CD3 Epsilon Chain with and without N-Terminal His6 Tag Transfected into the Murine T Cell Line EL4

[0451] 6.1. Cloning and Expression of the Human CD3 Epsilon Chain with N-Terminal Six Histidine Tag (His6 Tag)

[0452] A cDNA fragment coding for the human CD3 epsilon chain with a N-terminal His6 tag was obtained by gene synthesis. The gene synthesis fragment was designed as to contain first a Kozak site for eukaryotic expression of the construct, which is followed in frame by the coding sequence of a 19 amino acid immunoglobulin leader peptide, which is followed in frame by the coding sequence of a His6 tag which is followed in frame by the coding sequence of the mature human CD3 epsilon chain (the cDNA and amino acid sequences of the construct are listed as SEQ ID NOs 380 and 379). The gene synthesis fragment was also designed as to contain restriction sites at the beginning and the end of the cDNA. The introduced restriction sites EcoRI at the 5′ end and SalI at the 3′ end, were used in the following cloning procedures. The gene synthesis fragment was then cloned via EcoRI and SalI into a plasmid designated pEF-NEO (as described above) following standard protocols. A sequence verified plasmid was used to transfect the murine T cell line EL4. Transfection and selection of the transfectants were performed as described above. After 34 days of cell culture the transfectants were used for the assay described below.

[0453] 6.2. Binding of the Cross-Species Specific Anti-CD3 Binding Molecule H2C HLP to the Human CD3 Epsilon Chain with and without N-Terminal His6 Tag

[0454] A chimeric IgG antibody with the binding specificity H2C HLP specific for CD3 epsilon was tested for binding to human CD3 epsilon with and without N-terminal His6 tag. Binding of the antibody to the EL4 cell lines transfected the His6-human CD3 epsilon and wild-type human CD3 epsilon respectively was tested by an FACS assay according to standard protocols. 2.5×10⁵ cells of the transfectants were incubated with 50 μl of cell culture supernatant containing the chimeric IgG antibody or 50 μl of the respective control antibodies at 5 μg/ml in PBS with 2% FCS. As negative control an appropriate isotype control and as positive control for expression of the constructs the CD3 specific antibody UCHT-1 were used respectively. The binding of the antibodies was detected with a R-Phycoerythrin-conjugated affinity purified F(ab′)2 fragment, goat anti-mouse IgG, Fc-gamma fragment specific, diluted 1:100 in PBS with 2% FCS (Jackson ImmunoResearch Europe Ltd., Newmarket, Suffolk, UK). Samples were measured on a FACSCalibur (BD biosciences, Heidelberg, Germany). Compared to the EL4 cell line transfected with wild-type human CD3 epsilon a clear loss of binding of the chimeric IgG with binding specificity H2C HLP to human-CD3 epsilon with an N-terminal His6 tag was detected. These results showed that a free N-terminus of CD3 epsilon is essential for binding of the cross-species specific anti-CD3 binding specificity H2C HLP to the human CD3 epsilon chain (FIG. 9).

[0455] 7. Determination of the Binding Constant KD of Bispecific Single Chain Antibody Cross-Species Specific for Primate EGFR and Primate CD3 (EGFR LH×H2C HLP) to the Fusion Protein 1-27 CD3-Fc by Plasmon Surface Resonance Measurement Compared to Binding to CD3 Expressing PBMC Measured by a Fluorescence Activated Cell Sorter (FACS)

[0456] 7.1. Plasmon Surface Resonance Measurement

[0457] To determine the binding affinity of the fully cross-species specific bispecific single chain antibody EGFR-21-63 LH×H2C HLP to amino acids 1-27 of the N-terminus of the human CD3 epsilon chain a Surface Plasmon Resonance measurement was performed with a recombinant fusion protein consisting of the N-terminal amino acids 1-27 of the mature human CD3 epsilon chain fused to a Fc-part of human IgG1 (1-27 CD3-Fc). To this end a Biacore Carboxymethyl-Dextran CM5 chip (Biacore, Uppsala, Sweden) was installed on a Biacore 2000® system (Biacore, Uppsala, Sweden). One flow cell was activated by a N-(3-Dimethylaminopropyl)-N′-ethylcarbodiimide hydrochloride/N-Hydroxysuccinimide solution according to standard procedures. A solution of the fusion protein 1-27 CD3-Fc was added afterwards resulting in stable covalent linkage of the protein to the dextran layer of the Biacore chip. Unbound protein was removed by extensive washing followed by blocking of unreacted remaining NHS-activated carboxy groups by adding an ethanolamine solution. Success of protein coupling was confirmed by a higher signal measured as Response Units compared to the signal prior to coupling. A reference cell was prepared as described but without adding a protein solution.

[0458] Purified bispecific antibody EGFR-21-63 LH×H2C HLP was extensively dialyzed against HBS-EP buffer (Biacore, Uppsala, Sweden) in a Slide-A-Lyzer® Mini Dialysis Unit (Pierce, Rockford-II, USA). Protein concentration after dialysis was determined by UV280 nm absorption resulting in a concentration of 43 μg/ml.

[0459] The protein solution was transferred into a 96 well plate and serially diluted with HBS-EP buffer at a 1:1 ratio to 10 further wells.

[0460] Surface Plasmon Resonance Measurements were done by separately sampling all 11 wells. The flow cells were regenerated with acetate buffer between measurements to release bound protein.

[0461] Binding signals of bispecific antibody molecules were obtained by subtraction of the signal of the reference cell from the signal of the measurement cell conjugated with the 1-27 CD3-Fc protein. Association and dissociation curves were measured as Response Units and recorded. The binding constants were calculated using the Biacore® curve fitting software based on the Langmuir model.

[0462] The calculated binding constant KD over the first five concentrations was determined to be 1.52×10⁻⁷ M.

[0463] 7.2. Determination of CD3 Binding Constant by FACS Measurement

[0464] In order to test the affinity of the cross-species specific bispecific antibody molecules with regard to the binding strength to native human CD3, an additional saturation FACS binding analysis was performed. The chosen bispecific antibody molecule EGFR-21-63 LH×H2C HLP was used to set up a dilution row with a factor of 1:1.5 and a starting concentration of 63.3 μg/ml. The bispecific antibody molecule was incubated at these different concentrations with 1.25×10⁵ human PBMCs each for 1 hour a 4° C. followed by two washing steps in PBS at 4° C. The detection of the bound bispecific antibody molecules was carried out by using a Penta-His antibody (Qiagen GmbH, Hildesheim, Germany) at 5 μg/ml in 50 μl PBS with 2% FCS. After incubation for 45 minutes at 4° C. and two washing steps the binding of the Penta-His antibody was detected with an R-Phycoerythrin-conjugated affinity purified F(ab′)2 fragment, goat anti-mouse IgG, Fc-gamma fragment specific, diluted 1:100 in PBS with 2% FCS (Jackson ImmunoResearch Europe Ltd., Newmarket, Suffolk, UK). Flow cytometry was performed on a FACS-Canto II apparatus, the FACS Diva software was used to acquire and analyze the data (Becton Dickinson biosciences, Heidelberg). FACS staining and measuring of the fluorescence intensity were performed as described in Current Protocols in Immunology (Coligan, Kruisbeek, Margulies, Shevach and Strober, Wiley-Interscience, 2002). The acquired fluorescence intensity mean values were plotted as a function of the used bispecific antibody molecule concentration and analyzed by the biomathematical software Prism in a one side binding analysis (hyperbola). The software calculated the corresponding KD value that described the binding of a ligand (the bispecific antibody molecule) to a receptor (the CD3 positive PBMC subtraction) that follows the law of mass action. The underlying formula is as follows: Y=Bmax×X/(Kd+X) with Bmax being the maximal binding. KD is the concentration of ligand required to reach half-maximal binding. The FACS staining was carried out in duplicates, the R² values were better than 0.95.

[0465] The determined half-maximal binding for the bispecific antibody molecule EGFR-21-63 LH×H2C HLP was reached at a concentration of 8472 ng/ml which corresponds to 154 nM (1.54×10⁻⁷ M) at a given molecular mass of 55000 Dalton (FIG. 10).

[0466] Thus, the affinity of EGFR-21-63 LH×H2C HLP to the N-terminal amino acids 1-27 of the human CD3 epsilon chain separated from their native CD3-context proved to be equal to the affinity of EGFR-21-63 LH×H2C HLP to native CD3 on intact T cells.

[0467] 8. Generation of CHO Cells Transfected with Human EGFR

[0468] The cell line positive for human EGFR, A431 (epidermoid carcinoma cell line, CRL-1555, American Type Culture Collection, Rockville, Md.) was used to obtain the total RNA that was isolated according to the instructions of the kit manual (Qiagen, RNeasy Mini Kit, Hilden, Germany). The obtained RNA was used for cDNA synthesis by random-primed reverse transcription. For cloning of the full length sequence of the human EGFR antigen the following oligonucleotides were used:

5′ EGFR AG XbaI
5′-GGTCTAGAGCATGCGACCCTCCGGGACGGCCGGG-3′
3′ EGFR AG SalI
5′-TTTTAAGTCGACTCATGCTCCAATAAATTCACTGCT-3′

[0469] The coding sequence was amplified by PCR (denaturation at 94° C. for 5 min, annealing at 58° C. for 1 min, elongation at 72° C. for 2 min for the first cycle; denaturation at 94° C. for 1 min, annealing at 58° C. for 1 min, elongation at 72° C. for 2 min for 30 cycles; terminal extension at 72° C. for 5 min). The PCR product was subsequently digested with XbaI and SalI, ligated into the appropriately digested expression vector pEF-DHFR (Raum et al., Cancer Immunol. Immunother. 2001; 50: 141-150), and transformed into E. coli. The afore-mentioned procedures were carried out according to standard protocols (Sambrook, Molecular Cloning; A Laboratory Manual, 3rd edition, Cold Spring Harbour Laboratory Press, Cold Spring Harbour, N.Y. (2001)). A clone with sequence-verified nucleotide sequence (SEQ ID 370, Amino acid sequence SEQ ID 369) was transfected into DHFR deficient CHO cells for eukaryotic expression of the construct. Eukaryotic protein expression in DHFR deficient CHO cells was performed as described by Kaufmann R. J. (1990) Methods Enzymol. 185, 537-566. Gene amplification of the construct was induced by increasing concentrations of methothrexate (MTX) to a final concentration of up to 20 nM MTX.

[0470] 9. Generation of CHO Cells Expressing the Extracellular Domain of Cynomolgus EGFR

[0471] The cDNA sequence of the extracellular domain of cynomolgus EGFR was obtained by a set of two PCRs on cynomolgus monkey colon cDNA (Cat #: C1534090-Cy-BC; obtained from BioCat GmbH, Heidelberg, Germany) using the following reaction conditions: 1 cycle at 94° C. for 3 minutes followed by 35 cycles with 94° C. for 1 minute, 53° C. for 1 minute and 72° C. for 2 minutes followed by a terminal cycle of 72° C. for 3 minutes. The following primers were used:

```
1. forward primer:
      5′- CGCTCTGCCCGGCGAGTCGGGC -3′
      reverse primer:
      5′- CCGTCTTCCTCCATCTCATAGC -3′
2. forward primer:
      5′- ACATCCGGAGGTGACAGATCACGGCTCGTGC -3′
      reverse primer:
      5′- CAGGATATCCGAACGATGTGGCGCCTTCGC -3′
```

[0472] Those PCRs generated two overlapping fragments (A: 1-869, B: 848-1923), which were isolated and sequenced according to standard protocols using the PCR primers, and thereby provided a 1923 by portion of the cDNA sequence of cynomolgus EGFR from the third nucleotide of codon +1 of the mature protein to the 21^{st} codon of the transmembrane domain. To generate a construct for expression of cynomolgus EGFR a cDNA fragment was obtained by gene synthesis according to standard protocols (the cDNA and amino acid sequence of the construct is listed under SEQ ID Nos 372 and 371). In this construct the coding sequence for cynomolgus EGFR from amino acid +2 to +641 of the mature EGFR protein was fused into the coding sequence of human EGFR replacing the coding sequence of the amino acids +2 to +641. The gene synthesis fragment was also designed as to contain a Kozak site for eukaryotic expression of the construct and restriction sites at the beginning and the end of the cDNA coding for essentially the extracellular domain of cynomolgus EGFR fused to the transmembrane and intracellular domains of human EGFR. Furthermore a conservative mutation was introduced at amino acid 627 (4^{th} amino acid of the transmembrane domain) mutating valine into leucine to generate a restriction site (SphI) for cloning purposes. The introduced restriction sites XbaI at the 5′ end and SalI at the 3′ end, were utilised in the following cloning procedures. The gene synthesis fragment was then cloned via XbaI and SalI into a plasmid designated pEF-DHFR (pEF-DHFR is described in Mack et al. Proc. Natl. Acad. Sci. USA 92 (1995) 7021-7025). A sequence verified clone of this plasmid was used to transfect CHO/dhfr− cells as described above.

[0473] 10. Generation of EGFR and CD3 Cross-Species Specific Bispecific Single Chain Molecules

[0474] 10.1. Cloning of Cross-Species Specific Binding Molecules

[0475] Generally, bispecific single chain antibody molecules, each comprising a domain with a binding specificity cross-species specific for human and non-chimpanzee primate CD3 epsilon as well as a domain with a binding specificity cross-species specific for human and non-chimpanzee primate EGFR, were designed as set out in the following Table 1:

TABLE 1
Formats of anti-CD3 and anti-EGFR cross-species specific
bispecific single chain antibody molecules

| SEQ ID | Formats of protein constructs |
|---|---|
| (nucl/prot) | (N → C) |
| 294/293 | EGFR-21-63 LH × H2C HL |
| 296/295 | EGFR-21-63 LH × H2C HLP |
| 302/301 | EGFR-21-63 LH × A2J HLP |
| 298/297 | EGFR-21-63 LH × H1E HLP |
| 306/305 | EGFR-21-63 LH × E2M HLP |
| 308/307 | EGFR-21-63 LH × F7O HLP |
| 864/863 | EGFR-21-63 LH × I2C HL |
| 900/899 | E291C4 HL × I2C HL |
| 898/897 | E291C4 HL × F12Q HL |
| 896/895 | E291C4 HL × H2C HL |
| 882/881 | E291H8 HL × I2C HL |
| 918/917 | E292F3 HL × I2C HL |
| 936/935 | E98H5 HL × I2C HL |
| 932/931 | E98H5 HL × H2C HL |
| 934/933 | E98H5 HL × F12Q HL |
| 972/971 | E97H9 HL × I2C HL |
| 970/969 | E97H9 HL × F12Q HL |
| 968/967 | E97H9 HL × H2C HL |
| 954/953 | E98C3 HL × I2C HL |
| 952/951 | E98C3 HL × F12Q HL |
| 950/949 | E98C3 HL × H2C HL |
| 990/989 | E97B11 HL × I2C HL |
| 988/987 | E97B11 HL × F12Q HL |
| 986/985 | E97B11 HL × H2C HL |
| 1018/1017 | E12E3 HL × I2C HL |
| 1032/1031 | E12B7 HL × I2C HL |
| 1046/1045 | E12E6 HL × I2C HL |
| 1060/1059 | E12F12 HL × I2C HL |
| 1004/1003 | E13B4 HL × I2C HL |
| 1074/1073 | E13H7 HL × I2C HL |
| 1088/1087 | E13E6 HL × I2C HL |
| 1102/1101 | E13E2 HL × I2C HL |

[0476] The aforementioned constructs containing the variable light-chain (L) and variable heavy-chain (H) domains cross-species specific for human and cynomolgus EGFR were obtained by gene synthesis. The gene synthesis fragments were designed as to contain first a Kozak site for eukaryotic expression of the construct, followed by a 19 amino acid immunoglobulin leader peptide, followed in frame by the coding sequence of the respective bispecific single chain antibody molecule, followed in frame by the coding sequence of a 6 histidine tag and a stop codon. The gene synthesis fragment was also designed as to introduce suitable restriction sites at the beginning and at the end of the fragment. The introduced restriction sites were utilized in the following cloning procedures. The gene synthesis fragment was also designed as to introduce suitable N- and C-terminal restriction sites. The gene synthesis fragment was cloned via these restriction sites into a plasmid designated pEF-DHFR (pEF-DHFR is described in Raum et al. Cancer Immunol Immunother 50 (2001) 141-150) according to standard protocols (Sambrook, Molecular Cloning; A Laboratory Manual, 3rd edition, Cold Spring Harbour Laboratory Press, Cold Spring Harbour, N.Y. (2001)). A clone with sequence-verified nucleotide sequence was transfected into dihydrofolate reductase (DHFR) deficient Chinese hamster ovary (CHO) cells for eukaryotic expression of the construct.

[0477] The constructs were transfected stably or transiently into DHFR-deficient CHO-cells (ATCC No. CRL 9096) by electroporation or alternatively into HEK 293 (human embryonal kidney cells, ATCC Number: CRL-1573) in a transient manner according to standard protocols.

[0478] 10.2. Expression and Purification of the Bispecific Single Chain Antibody Molecules

[0479] The bispecific single chain antibody molecules were expressed in chinese hamster ovary cells (CHO). Eukaryotic protein expression in DHFR deficient CHO cells was performed as described by Kaufmann R. J. (1990) Methods Enzymol. 185, 537-566. Gene amplification of the constructs was induced by increasing final concentrations of MTX up to 20 nM. After two passages of stationary culture the cells were grown in roller bottles with nucleoside-free HyQ PF CHO liquid soy medium (with 4.0 mM L-Glutamine with 0.1% Pluronic F—68; HyClone) for 7 days before harvest. The cells were removed by centrifugation and the supernatant containing the expressed protein was stored at −20° C. Alternatively, constructs were transiently expressed in HEK 293 cells. Transfection was performed with 293fectin reagent (Invitrogen, #12347-019) according to the manufacturer's protocol.

[0480] Äkta® Explorer System (GE Health Systems) and Unicorn® Software were used for chromatography. Immobilized metal affinity chromatography (“IMAC”) was performed using a Fractogel EMD chelate® (Merck) which was loaded with ZnCl2 according to the protocol provided by the manufacturer. The column was equilibrated with buffer A (20 mM sodium phosphate buffer pH 7.2, 0.1 M NaCl) and the cell culture supernatant (500 ml) was applied to the column (10 ml) at a flow rate of 3 ml/min. The column was washed with buffer A to remove unbound sample. Bound protein was eluted using a two step gradient of buffer B (20 mM sodium phosphate buffer pH 7.2, 0.1 M NaCl, 0.5 M Imidazol) according to the following:

[0481] Step 1: 20% buffer B in 6 column volumes

[0482] Step 2: 100% buffer B in 6 column volumes

[0483] Eluted protein fractions from step 2 were pooled for further purification. All chemicals were of research grade and purchased from Sigma (Deisenhofen) or Merck (Darmstadt).

[0484] Gel filtration chromatography was performed on a HiLoad 16/60 Superdex 200 prep grade column (GE/Amersham) equilibrated with Equi-buffer (25 mM Citrat, 200 mM Lysin, 5% Glycerol, pH 7.2). Eluted protein samples (flow^{.} rate 1 ml/min) were subjected to standard SDS-PAGE and Western Blot for detection. Prior to purification, the column was calibrated for molecular weight determination (molecular weight marker kit, Sigma MW GF-200). Protein concentrations were determined using OD280 nm.

[0485] Purified bispecific single chain antibody protein was analyzed in SDS PAGE under reducing conditions performed with pre-cast 4-12% Bis Tris gels (Invitrogen). Sample preparation and application were performed according to the protocol provided by the manufacturer. The molecular weight was determined with MultiMark protein standard (Invitrogen). The gel was stained with colloidal Coomassie (Invitrogen protocol). The purity of the isolated protein was >95% as determined by SDS-PAGE.

[0486] The bispecific single chain antibody has a molecular weight of about 52 kDa under native conditions as determined by gel filtration in PBS. All constructs were purified according to this method.

[0487] Western Blot was performed using an Optitran® BA-S83 membrane and the Invitrogen Blot Module according to the protocol provided by the manufacturer. The antibodies used were directed against the His Tag (Penta His, Qiagen) and Goat-anti-mouse Ig labeled with alkaline phosphatase (AP) (Sigma), and BCIP/NBT (Sigma) as substrate. A single band was detected at 52 kD corresponding to the purified bispecific single chain antibody.

[0488] 11. Determination of the Binding Constant KD of Fully Cross-Species Specific Bispecific Single Chain Antibodies to the Fusion Protein 1-27 CD3-Fc by Surface Plasmon Resonance Measurement

[0489] To determine the binding affinities of bispecific single chain antibody molecules cross-species specific to primate EGFR and primate CD3 to the amino acids 1-27 of the N-terminus of the mature human CD3 epsilon chain a Surface Plasmon Resonance measurement was performed with a recombinant fusion protein consisting of the N-terminal amino acids 1-27 of the human CD3 epsilon chain fused to a Fc-part of human IgG1 (1-27 CD3-Fc). To this end a Biacore Carboxymethyl-Dextran CM5 chip (Biacore, Uppsala, Sweden) was installed on a Biacore 2000® system (Biacore, Uppsala, Sweden). A flow cell was activated by a N-(3-Dimethylaminopropyl)-N′-ethylcarbodiimide hydrochloride/N-Hydroxysuccinimide solution according to standard procedures. A solution of the fusion protein 1-27 CD3-Fc was added afterwards resulting in stable covalent linkage of the protein to the dextran layer of the Biacore chip. Unbound protein was removed by extensive washing followed by blocking of remaining unreacted NHS-activated carboxy groups by adding an ethanolamine solution. Success of protein coupling was confirmed by detection of a higher signal measured as Response Units compared to the signal prior to coupling. A reference cell was prepared as described but without adding the protein solution.

[0490] Purified bispecific single chain antibodies listed below were adjusted to 5 μg/ml with HBS-EP buffer (Biacore, Uppsala, Sweden) and transferred into a 96 well plate each at a volume of 150 μl.

[0491] Surface Plasmon Resonance Measurements were performed for all samples and the flow cells were regenerated with acetate buffer between measurements to release bound protein (all according to standard protocols).

[0492] Binding signals of the bispecific single chain antibodies were obtained by subtraction of the signal of the reference cell from the signal of the measurement cell conjugated with the 1-27 CD3-Fc protein.

[0493] Association and dissociation curves were measured as Response Units and recorded. The binding constants were calculated using the Biacore® curve-fitting software based on the Langmuir model. The calculated affinities for the tested fully cross-species specific bispecific single chain molecules to the N-terminal amino acids 1-27 of the human CD3 epsilon are given as KD values below and range from 2.54×10⁻⁶ M to 2.49×10⁻⁷ M. “LH” refers to an arrangement of variable domains in the order VL-VH. “HL” refers to an arrangement of variable domains in the order VH-VL. G4H, F70, A2J, E1L, E2M, H1E and F6A refer to different cross-species specific CD3 binding molecules.

| Bispecific antibody molecule | KD (M) |
|---|---|
| EGFR LH × F7O HLP | 1.01 × 10⁻⁶ |
| EGFR LH × A2J HLP | 2.49 × 10⁻⁷ |
| EGFR LH × E2M HLP | 2.46 × 10⁻⁶ |
| EGFR LH × H1E HLP | 2.54 × 10⁻⁶ |

[0494] 12. Flow Cytometric Binding Analysis of the EGFR and CD3 Cross-Species Specific Bispecific Antibodies

[0495] In order to test the functionality of the cross-species specific bispecific antibody constructs with regard to binding capability to human and cynomolgus EGFR and CD3, respectively, a FACS analysis was performed. For this purpose CHO cells transfected with human EGFR as described in Example 8 and human CD3 positive T cell leukemia cell line HPB-ALL (DSMZ, Braunschweig, ACC483) were used to test the binding to human antigens. The binding reactivity to cynomolgus antigens was tested by using the generated cynomolgus EGFR transfectant described in Example 9 and a macaque T cell line 4119LnPx (kindly provided by Prof Fickenscher, Hygiene Institute, Virology, Erlangen-Nuernberg; published in Knappe A, et al., and Fickenscher H., Blood 2000, 95, 3256-61) 200,000 cells of the respective cell population were incubated for 30 min on ice with 50 μl of the purified protein of the cross-species specific bispecific antibody constructs (2 μg/ml). Alternatively, the cell culture supernatant of transiently produced proteins was used. The cells were washed twice in PBS and binding of the construct was detected with a murine Penta His antibody (Qiagen; diluted 1:20 in 50 μl PBS with 2% FCS). After washing, bound anti His antibodies were detected with an Fc gamma-specific antibody (Dianova) conjugated to phycoerythrin, diluted 1:100 in PBS with 2% FCS. Fresh culture medium was used as a negative control.

[0496] Flow cytometry was performed on a FACS-Calibur apparatus, the CellQuest software was used to acquire and analyze the data (Becton Dickinson biosciences, Heidelberg). FACS staining and measuring of the fluorescence intensity were performed as described in Current Protocols in Immunology (Coligan, Kruisbeek, Margulies, Shevach and Strober, Wiley-Interscience, 2002).

[0497] The binding ability of several bispecific single chain molecules which are specific for EGFR and cross-species specific for human and non-chimpanzee primate CD3 were clearly detectable as shown in FIG. 11. In the FACS analysis, all constructs showed binding to CD3 and EGFR compared to culture medium and first and second detection antibody as the negative controls. Cross-species specificity of the bispecific antibody to human and cynomolgus CD3 and EGFR antigens was demonstrated.

[0498] 13. Bioactivity of EGFR and CD3 Cross-Species Specific Bispecific Single Chain Antibodies

[0499] Bioactivity of the generated bispecific single chain antibodies was analyzed by chromium 51 (⁵¹Cr) release in vitro cytotoxicity assays using the EGFR positive cell lines described in Examples 8 and 9. As effector cells stimulated human CD8 positive T cells or the macaque T cell line 4119LnPx were used, respectively.

[0500] Generation of the stimulated CD8+ T cells was performed as follows:

[0501] A Petri dish (145 mm diameter, Greiner) was pre-coated with a commercially available anti-CD3 specific antibody in a final concentration of 1 μg/ml for 1 hour at 37° C. Unbound protein was removed by one washing step with PBS. The fresh PBMC's were isolated from peripheral blood (30-50 ml human blood) by Ficoll gradient centrifugation according to standard protocols. 3-5×10⁷ PBMCs were added to the precoated petri dish in 120 ml of RPMI 1640/10% FCS/IL-2 20 U/ml (Proleukin, Chiron) and stimulated for 2 days. At the third day the cells were collected, washed once with RPMI 1640. IL-2 was added to a final concentration of 20 U/ml and cultivated again for one day. CD8+ cytotoxic T lymphocytes (CTLs) were isolated by depletion of CD4+ T cells and CD56+ NK cells.

[0502] Target cells were washed twice with PBS and labeled with 11.1 MBq ⁵¹Cr in a final volume of 100 μl RPMI with 50% FCS for 45 minutes at 37° C. Subsequently the labeled target cells were washed 3 times with 5 ml RPMI and then used in the cytotoxicity assay. The assay was performed in a 96 well plate in a total volume of 250 μl supplemented RPMI (as above) with an E:T ratio of 10:1. 1 μg/ml of the cross-species specific bispecific single chain antibody molecules and 20 threefold dilutions thereof were applied. Alternatively cell culture supernatant of transiently produced proteins was serially diluted in 1:2 steps. The assay time is 18 hours and cytotoxicity was measured as relative values of released chromium in the supernatant related to the difference of maximum lysis (addition of Triton-X) and spontaneous lysis (without effector cells). All measurements were done in quadruplicates. Measurement of chromium activity in the supernatants was performed with a Wizard 3″ gammacounter (Perkin Elmer Life Sciences GmbH, Köln, Germany). Analysis of the experimental data was performed with Prism 4 for Windows (version 4.02, GraphPad Software Inc., San Diego, Calif., USA). Sigmoidal dose response curves typically had R² values >0.90 as determined by the software. EC₅₀ values calculated by the analysis program were used for comparison of bioactivity.

[0503] As shown in FIGS. 12 and 13 all of the generated cross-species specific bispecific single chain antibody constructs revealed cytotoxic activity against human EGFR positive target cells elicited by human CD8+ cells and cynomolgus EGFR positive target cells elicited by the macaque T cell line 4119LnPx. A bispecific single chain antibody with different target specificity was used as negative control.

[0504] 14. Cloning and Expression of the C-Terminal, Transmembrane and Truncated Extracellular Domains of Human MCSP

[0505] The coding sequence of the C-terminal, transmembrane and truncated extracellular domain of human MCSP (amino acids 1538-2322) was obtained by gene synthesis according to standard protocols (cDNA sequence and amino acid sequence of the recombinant construct for expression of the C-terminal, transmembrane and truncated extracellular domain of human MCSP (designated as human D3) are listed under SEQ ID NOs 374 and 373). The gene synthesis fragment was designed as to contain first a Kozak site to allow eukaryotic expression of the construct followed by the coding sequence of an 19 amino acid immunoglobulin leader peptide followed in frame by a FLAG tag, followed in frame by a sequence containing several restriction sites for cloning purposes and coding for a 9 amino acid artificial linker (SRTRSGSQL), followed in frame by the coding sequence of the C-terminal, transmembrane and truncated extracellular domain of human MCSP and a stop codon. Restriction sites were introduced at the beginning and at the end of the DNA fragment. The restriction sites EcoRI at the 5′ end and SalI at the 3′ end were used in the following cloning procedures. The fragment was digested with EcoRI and SalI and cloned into pEF-DHFR (pEF-DHFR is described in Mack et al. Proc. Natl. Acad. Sci. USA 92 (1995) 7021-7025) following standard protocols. A sequence verified plasmid was used to transfect CHO/dhfr− cells (ATCC No. CRL 9096). Cells were cultivated in RPMI 1640 with stabilized glutamine, supplemented with 10% FCS, 1% penicillin/streptomycin (all obtained from Biochrom AG Berlin, Germany) and nucleosides from a stock solution of cell culture grade reagents (Sigma-Aldrich Chemie GmbH, Taufkirchen, Germany) to a final concentration of 10 μg/ml Adenosine, 10 μg/ml Deoxyadenosine and 10 μg/ml Thymidine, in an incubator at 37° C., 95% humidity and 7% CO₂. Transfection was performed using the PolyFect Transfection Reagent (Qiagen GmbH, Hilden, Germany) and 5 μg of plasmid DNA according to the manufacturer's protocol. After cultivation for 24 hours cells were washed once with PBS and cultivated again in RPMI 1640 with stabilized glutamine and 1% penicillin/streptomycin. Thus the cell culture medium did not contain nucleosides and thereby selection was applied on the transfected cells. Approximately 14 days after transfection the outgrowth of resistant cells was observed. After an additional 7 to 14 days the transfectants were tested for expression of the construct by FACS analysis. 2.5×10⁵ cells were incubated with 50 μl of an anti-Flag-M2 antibody (Sigma-Aldrich Chemie GmbH, Taufkirchen, Germany) diluted to 5 μg/ml in PBS with 2% FCS. The binding of the antibody was detected with a R-Phycoerythrin-conjugated affinity purified F(ab′)2 fragment, goat anti-mouse IgG, Fc-gamma fragment specific diluted 1:100 in PBS with 2% FCS (ImmunoResearch Europe Ltd., Newmarket, Suffolk, UK). The samples were measured on a FACScalibur (BD biosciences, Heidelberg, Germany).

[0506] 15. Cloning and Expression of the C-Terminal, Transmembrane and Truncated Extracellular Domains of Macaque MCSP

[0507] The cDNA sequence of the C-terminal, transmembrane and truncated extracellular domains of macaque MCSP (designated as macaque D3) was obtained by a set of three PCRs on macaque skin cDNA (Cat No. C1534218-Cy-BC; BioCat GmbH, Heidelberg, Germany) using the following reaction conditions: 1 cycle at 94° C., 3 min., 40 cycles with 94° C. for 0.5 min., 52° C. for 0.5 min. and 72° C. for 1.75 min., terminal cycle of 72° C. for 3 min. The following primers were used:

forward primer:
5′-GATCTGGTCTACACCATCGAGC-3′
reverse primer:
5′-GGAGCTGCTGCTGGCTCAGTGAGG-3′
forward primer:
5′-TTCCAGCTGAGCATGTCTGATGG-3′
reverse primer:
5′-CGATCAGCATCTGGGCCCAGG-3′
forward primer:
5′-GTGGAGCAGTTCACTCAGCAGGACC-3′
reverse primer:
5′-GCCTTCACACCCAGTACTGGCC-3′

[0508] Those PCRs generated three overlapping fragments (A: 1-1329, B: 1229-2428, C: 1782-2547) which were isolated and sequenced according to standard protocols using the PCR primers and thereby provided a 2547 by portion of the cDNA sequence of macaque MCSP (the cDNA sequence and amino acid sequence of this portion of macaque MCSP are listed under SEQ ID NOs 376 and 375) from 74 by upstream of the coding sequence of the C-terminal domain to 121 by downstream of the stop codon. Another PCR using the following reaction conditions: 1 cycle at 94° C. for 3 min, 10 cycles with 94° C. for 1 min, 52° C. for 1 min and 72° C. for 2.5 min, terminal cycle of 72° C. for 3 min was used to fuse the PCR products of the aforementioned reactions A and B. The following primers are used:

[0509] forward primer: 5′-tcccgtacgagatctggatcccaattggatggcggactcgtgctgttctcacacagagg-3′

[0510] reverse primer: 5′-agtgggtcgactcacacccagtactggccattcttaagggcaggg-3′

[0511] The primers for this PCR were designed to introduce restriction sites at the beginning and at the end of the cDNA fragment coding for the C-terminal, transmembrane and truncated extracellular domains of macaque MCSP. The introduced restriction sites MfeI at the 5′ end and Sail at the 3′ end, were used in the following cloning procedures. The PCR fragment was then cloned via MfeI and SalI into a Bluescript plasmid containing the EcoRI/MfeI fragment of the aforementioned plasmid pEF-DHFR (pEF-DHFR is described in Raum et al. Cancer Immunol Immunother 50 (2001) 141-150) by replacing the C-terminal, transmembrane and truncated extracellular domains of human MCSP. The gene synthesis fragment contained the coding sequences of the immunoglobulin leader peptide and the Flag tag as well as the artificial linker (SRTRSGSQL) in frame to the 5′ end of the cDNA fragment coding for the C-terminal, transmembrane and truncated extracellular domains of macaque MCSP. This vector was used to transfect CHO/dhfr− cells (ATCC No. CRL 9096). Cells were cultivated in RPMI 1640 with stabilized glutamine supplemented with 10% FCS, 1% penicillin/streptomycin (all from Biochrom AG Berlin, Germany) and nucleosides from a stock solution of cell culture grade reagents (Sigma-Aldrich Chemie GmbH, Taufkirchen, Germany) to a final concentration of 10 μg/ml Adenosine, 10 μg/ml Deoxyadenosine and 10 μg/ml Thymidine, in an incubator at 37° C., 95% humidity and 7% CO2. Transfection was performed with PolyFect Transfection Reagent (Qiagen GmbH, Hilden, Germany) and 5 μg of plasmid DNA according to the manufacturer's protocol. After cultivation for 24 hours cells were washed once with PBS and cultivated again in RPMI 1640 with stabilized glutamine and 1% penicillin/streptomycin. Thus the cell culture medium did not contain nucleosides and thereby selection was applied on the transfected cells. Approximately 14 days after transfection the outgrowth of resistant cells is observed. After an additional 7 to 14 days the transfectants were tested for expression of the recombinant construct via FACS. 2.5×10⁵ cells were incubated with 50 μl of an anti-Flag-M2 antibody (Sigma-Aldrich Chemie GmbH, Taufkirchen, Germany) diluted to 5 μg/ml in PBS with 2% FCS. Bound antibody was detected with a R-Phycoerythrin-conjugated affinity purified F(ab′)2 fragment, goat anti-mouse IgG, Fc-gamma fragment specific, diluted 1:100 in PBS with 2% FCS (Jackson ImmunoResearch Europe Ltd., Newmarket, Suffolk, UK). Samples were measured on a FACScalibur (BD biosciences, Heidelberg, Germany).

[0512] 16. Generation and Characterisation of MCSP and CD3 Cross-Species Specific Bispecific Single Chain Molecules

[0513] Bispecific single chain antibody molecules each comprising a binding domain cross-species specific for human and non-chimpanzee primate CD3 epsilon as well as a binding domain cross-species-specific for human and non-chimpanzee primate MCSP, are designed as set out in the following Table 2:

TABLE 2
Formats of MCSP and CD3 cross-species specific
bispecific single chain antibodies

| SEQ ID | Formats of protein constructs |
|---|---|
| (nucl/prot) | (N → C) |
| 310/309 | MCSP-G4 HL × H2C HL |
| 312/311 | MCSP-G4 HL × F12Q HL |
| 314/313 | MCSP-G4 HL × I2C HL |
| 316/315 | MCSP-G4 HLP × F6A HLP |
| 318/317 | MCSP-G4 HLP × H2C HLP |
| 322/321 | MCSP-G4 HLP × G4H HLP |
| 326/325 | MCSP-G4 HLP × E1L HLP |
| 328/327 | MCSP-G4 HLP × E2M HLP |
| 332/331 | MCSP-G4 HLP × F12Q HL |
| 334/333 | MCSP-G4 HLP × I2C HL |
| 336/335 | MCSP-D2 HL × H2C HL |
| 338/337 | MCSP-D2 HL × F12Q HL |
| 340/339 | MCSP-D2 HL × I2C HL |
| 342/341 | MCSP-D2 HLP × H2C HLP |
| 344/343 | MCSP-F9 HL × H2C HL |
| 346/345 | MCSP-F9 HLP × H2C HLP |
| 348/347 | MCSP-F9 HLP × G4H HLP |
| 1355/1354 | MCSP-A9 HL × H2C HL |
| 1357/1356 | MCSP-A9 HL × F12Q HL |
| 1359/1358 | MCSP-A9 HL × I2C HL |
| 1373/1372 | MCSP-C8 HL × I2C HL |
| 1401/1400 | MCSP-B7 HL × I2C HL |
| 1387/1386 | MCSP-B8 HL × I2C HL |
| 1415/1414 | MCSP-G8 HL × I2C HL |
| 1429/1428 | MCSP-D5 HL × I2C HL |
| 1443/1442 | MCSP-F7 HL × I2C HL |
| 1457/1456 | MCSP-G5 HL × I2C HL |
| 1471/1470 | MCSP-F8 HL × I2C HL |
| 1485/1484 | MCSP-G10 HL × I2C HL |

[0514] The aforementioned constructs containing the variable heavy-chain (VH) and variable light-chain (VL) domains cross-species specific for human and macaque MCSP D3 and the VH and VL domains cross-species specific for human and macaque CD3 were obtained by gene synthesis. The gene synthesis fragments were designed as to contain first a Kozak site for eukaryotic expression of the construct, followed by a 19 amino acid immunoglobulin leader peptide, followed in frame by the coding sequence of the respective bispecific single chain antibody molecule, followed in frame by the coding sequence of a histidine₆-tag and a stop codon. The gene synthesis fragment was also designed as to introduce suitable N- and C-terminal restriction sites. The gene synthesis fragment was cloned via these restriction sites into a plasmid designated pEF-DHFR (pEF-DHFR is described in Raum et al. Cancer Immunol Immunother 50 (2001) 141-150) according to standard protocols (Sambrook, Molecular Cloning; A Laboratory Manual, 3rd edition, Cold Spring Harbour Laboratory Press, Cold Spring Harbour, N.Y. (2001)). The constructs were transfected stably or transiently into DHFR-deficient CHO-cells (ATCC No. CRL 9096) by electroporation or alternatively into HEK 293 (human embryonal kidney cells, ATCC Number: CRL-1573) in a transient manner according to standard protocols.

[0515] Eukaryotic protein expression in DHFR deficient CHO cells was performed as described by Kaufmann R. J. (1990) Methods Enzymol. 185, 537-566. Gene amplification of the constructs was induced by addition of increasing concentrations of methothrexate (MTX) up to final concentrations of 20 nM MTX. After two passages of stationary culture the cells were grown in roller bottles with nucleoside-free HyQ PF CHO liquid soy medium (with 4.0 mM L-Glutamine with 0.1% Pluronic F—68; HyClone) for 7 days before harvest. The cells were removed by centrifugation and the supernatant containing the expressed protein is stored at −20° C.

[0516] Äkta® Explorer System (GE Health Systems) and Unicorn® Software were used for chromatography. Immobilized metal affinity chromatography (“IMAC”) was performed using a Fractogel EMD chelate® (Merck) which was loaded with ZnCl₂ according to the protocol provided by the manufacturer. The column was equilibrated with buffer A (20 mM sodium phosphate buffer pH 7.2, 0.1 M NaCl) and the cell culture supernatant (500 ml) was applied to the column (10 ml) at a flow rate of 3 ml/min. The column was washed with buffer A to remove unbound sample. Bound protein was eluted using a two step gradient of buffer B (20 mM sodium phosphate buffer pH 7.2, 0.1 M NaCl, 0.5 M Imidazole) according to the following:

[0517] Step 1: 20% buffer B in 6 column volumes

[0518] Step 2: 100% buffer B in 6 column volumes

[0519] Eluted protein fractions from step 2 were pooled for further purification. All chemicals are of research grade and purchased from Sigma (Deisenhofen) or Merck (Darmstadt).

[0520] Gel filtration chromatography was performed on a HiLoad 16/60 Superdex 200 prep grade column (GE/Amersham) equilibrated with Equi-buffer (25 mM Citrate, 200 mM Lysine, 5% Glycerol, pH 7.2). Eluted protein samples (flow rate 1 ml/min) were subjected to standard SDS-PAGE and Western Blot for detection. Prior to purification, the column was calibrated for molecular weight determination (molecular weight marker kit, Sigma MW GF-200). Protein concentrations were determined using OD280 nm.

[0521] Purified bispecific single chain antibody protein was analyzed in SDS PAGE under reducing conditions performed with pre-cast 4-12% Bis Tris gels (Invitrogen). Sample preparation and application were performed according to the protocol provided by the manufacturer. The molecular weight was determined with MultiMark protein standard (Invitrogen). The gel was stained with colloidal Coomassie (Invitrogen protocol). The purity of the isolated protein is >95% as determined by SDS-PAGE.

[0522] The bispecific single chain antibody has a molecular weight of about 52 kDa under native conditions as determined by gel filtration in phosphate buffered saline (PBS). All constructs were purified according to this method.

[0523] Western Blot was performed using an Optitran® BA-583 membrane and the Invitrogen Blot Module according to the protocol provided by the manufacturer. For detection of the bispecific single chain antibody protein antibodies an anti-His Tag antibody was used (Penta His, Qiagen). A Goat-anti-mouse Ig antibody labeled with alkaline phosphatase (AP) (Sigma) was used as secondary antibody and BCIP/NBT (Sigma) as substrate. A single band was detected at 52 kD corresponding to the purified bispecific single chain antibody.

[0524] Alternatively, constructs were transiently expressed in DHFR deficient CHO cells. In brief, 4×105 cells per construct were cultivated in 3 ml RPMI 1640 all medium with stabilized glutamine supplemented with 10% fetal calf serum, 1% penicillin/streptomycin and nucleosides from a stock solution of cell culture grade reagents (Sigma-Aldrich Chemie GmbH, Taufkirchen, Germany) to a final concentration of 10 μg/ml Adenosine, 10 μg/ml Deoxyadenosine and 10 μg/ml Thymidine, in an incubator at 37° C., 95% humidity and 7% CO2 one day before transfection. Transfection was performed with Fugene 6 Transfection Reagent (Roche, #11815091001) according to the manufacturer's protocol. 94 μl OptiMEM medium (Invitrogen) and 6 μl Fugene 6 are mixed and incubated for 5 minutes at room temperature. Subsequently, 1.5 μg DNA per construct were added, mixed and incubated for 15 minutes at room temperature. Meanwhile, the DHFR deficient CHO cells were washed with 1× PBS and resuspended in 1.5 ml RPMI 1640 all medium. The transfection mix was diluted with 600 μl RPMI 1640 all medium, added to the cells and incubated overnight at 37° C., 95% humidity and 7% CO2. The day after transfection the incubation volume of each approach was extended to 5 ml RPMI 1640 all medium. Supernatant was harvested after 3 days of incubation.

[0525] 17. Flow Cytometric Binding Analysis of the MCSP and CD3 Cross-Species Specific Bispecific Antibodies

[0526] In order to test the functionality of the cross-species specific bispecific antibody constructs regarding the capability to bind to human and macaque MCSP D3 and CD3, respectively, a FACS analysis was performed. For this purpose CHO cells transfected with human MCSP D3 (as described in Example 14) and the human CD3 positive T cell leukemia cell line HPB-ALL (DSMZ, Braunschweig, ACC483) were used to test the binding to human antigens. The binding reactivity to macaque antigens was tested by using the generated macaque MCSP D3 transfectant (described in Example 15) and a macaque T cell line 4119LnPx (kindly provided by Prof. Fickenscher, Hygiene Institute, Virology, Erlangen-Nuernberg; published in Knappe A, et al., and Fickenscher H., Blood 2000, 95, 3256-61). 200,000 cells of the respective cell lines were incubated for 30 min on ice with 50 μl of the purified protein of the cross-species specific bispecific antibody constructs (2 μg/ml) or cell culture supernatant of transfected cells expressing the cross-species specific bispecific antibody constructs. The cells were washed twice in PBS with 2% FCS and binding of the construct was detected with a murine anti-His antibody (Penta His antibody; Qiagen; diluted 1:20 in 50 μl PBS with 2% FCS). After washing, bound anti-His antibodies were detected with an Fc gamma-specific antibody (Dianova) conjugated to phycoerythrin, diluted 1:100 in PBS with 2% FCS. Supernatant of untransfected CHO cells was used as negative control for binding to the T cell lines. A single chain construct with irrelevant target specificity was used as negative control for binding to the MCSP-D3 transfected CHO cells.

[0527] Flow cytometry was performed on a FACS-Calibur apparatus; the CellQuest software was used to acquire and analyze the data (Becton Dickinson biosciences, Heidelberg). FACS staining and measuring of the fluorescence intensity were performed as described in Current Protocols in Immunology (Coligan, Kruisbeek, Margulies, Shevach and Strober, Wiley-Interscience, 2002).

[0528] The bispecific binding of the single chain molecules listed above, which are cross-species specific for MCSP D3 and cross-species specific for human and macaque CD3 was clearly detectable as shown in FIGS. 14, 15, 16 and 58. In the FACS analysis all constructs showed binding to CD3 and MCSP D3 as compared to the respective negative controls. Cross-species specificity of the bispecific antibodies to human and macaque CD3 and MCSP D3 antigens was demonstrated.

[0529] 18. Bioactivity of MCSP and CD3 Cross-Species Specific Bispecific Single Chain Antibodies

[0530] Bioactivity of the generated bispecific single chain antibodies was analyzed by chromium 51 (⁵¹Cr) release in vitro cytotoxicity assays using the MCSP D3 positive cell lines described in Examples 14 and 15. As effector cells stimulated human CD4/CD56 depleted PBMC, stimulated human PBMC or the macaque T cell line 4119LnPx are used as specified in the respective figures.

[0531] Generation of the stimulated CD4/CD56 depleted PBMC was performed as follows: Coating of a Petri dish (145 mm diameter, Greiner bio-one GmbH, Kremsmünster) was carried out with a commercially available anti-CD3 specific antibody (e.g. OKT3, Othoclone) in a final concentration of 1 μg/ml for 1 hour at 37° C. Unbound protein was removed by one washing step with PBS. The fresh PBMC were isolated from peripheral blood (30-50 ml human blood) by Ficoll gradient centrifugation according to standard protocols. 3-5×10⁷ PBMC were added to the precoated petri dish in 120 ml of RPMI 1640 with stabilized glutamine/10% FCS/IL-2 20 U/ml (Proleukin, Chiron) and stimulated for 2 days. On the third day the cells were collected and washed once with RPMI 1640. IL-2 was added to a final concentration of 20 U/ml and the cells were cultivated again for one day in the same cell culture medium as above. By depletion of CD4+ T cells and CD56+ NK cells according to standard protocols CD8+ cytotoxic T lymphocytes (CTLs) were enriched.

[0532] Target cells were washed twice with PBS and labelled with 11.1 MBq ⁵¹Cr in a final volume of 100 μl RPMI with 50% FCS for 45 minutes at 37° C. Subsequently the labelled target cells were washed 3 times with 5 ml RPMI and then used in the cytotoxicity assay. The assay was performed in a 96 well plate in a total volume of 250 μl supplemented RPMI (as above) with an E:T ratio 10:1. 1 μg/ml of the cross-species specific bispecific single chain antibody molecules and 20 threefold dilutions thereof were applied. If using supernatant containing the cross-species specific bispecific single chain antibody molecules, 21 two- and 20 threefold dilutions thereof were applied for the macaque and the human cytotoxicity assay, respectively. The assay time was 18 hours and cytotoxicity was measured as relative values of released chromium in the supernatant related to the difference of maximum lysis (addition of Triton-X) and spontaneous lysis (without effector cells). All measurements were done in quadruplicates. Measurement of chromium activity in the supernatants was performed with a Wizard 3″ gamma counter (Perkin Elmer Life Sciences GmbH, Köln, Germany). Analysis of the experimental data was performed with Prism 4 for Windows (version 4.02, GraphPad Software Inc., San Diego, Calif., USA). Sigmoidal dose response curves typically have R² values >0.90 as determined by the software. EC₅₀ values calculated by the analysis program were used for comparison of bioactivity.

[0533] As shown in FIGS. 17 to 21 and 59, all of the generated cross-species specific bispecific single chain antibody constructs demonstrate cytotoxic activity against human MCSP D3 positive target cells elicited by stimulated human CD4/CD56 depleted PBMC or stimulated PBMC and against macaque MCSP D3 positive target cells elicited by the macaque T cell line 4119LnPx.

[0534] 19. Plasma Stability of MCSP and CD3 Cross-Species Specific Bispecific Single Chain Antibodies

[0535] Stability of the generated bispecific single chain antibodies in human plasma was analyzed by incubation of the bispecific single chain antibodies in 50% human Plasma at 37° C. and 4° C. for 24 hours and subsequent testing of bioactivity. Bioactivity was studied in a chromium 51 (⁵¹Cr) release in vitro cytotoxicity assay using a MCSP positive CHO cell line (expressing MCSP as cloned according to example 14 or 15) as target and stimulated human CD8 positive T cells as effector cells.

[0536] EC₅₀ values calculated by the analysis program as described above were used for comparison of bioactivity of bispecific single chain antibodies incubated with 50% human plasma for 24 hours at 37° C. and 4° C. respectively with bispecific single chain antibodies without addition of plasma or mixed with the same amount of plasma immediately prior to the assay.

[0537] As shown in FIG. 22 and Table 3 the bioactivity of the G4 H-L×I2C H-L, G4 H-L×H2C H-L and G4 H-L×F12Q H-L bispecific antibodies was not significantly reduced as compared with the controls without the addition of plasma or with addition of plasma immediately before testing of bioactivity.

TABLE 3
bioactivity of the bispecific antibodies without
or with the addition of Plasma

| | Without | | | |
|---|---|---|---|---|
| Construct | plasma | With plasma | Plasma 37° C. | Plasma 4° C. |
| G4 H-L × | 300 | 796 | 902 | 867 |
| I2C H-L | | | | |
| G4 H-L × | 496 | 575 | 2363 | 1449 |
| H2C H-L | | | | |
| G4 H-L × | 493 | 358 | 1521 | 1040 |
| F12Q H-L | | | | |

[0538] 20. Redistribution of Circulating T Cells in the Absence of Circulating Target Cells by First Exposure to CD3 Binding Molecules Directed at Conventional i.e. Context Dependent CD3 Epitopes is a Major Risk Factor for Adverse Events Related to the Initiation of Treatment

[0539] T Cell Redistribution in Patients with B-Cell Non-Hodgkin-Lymphoma (B-NHL) Following Initiation of Treatment with the Conventional CD3 Binding Molecule

[0540] A conventional CD19×CD3 binding molecules is a CD3 binding molecule of the bispecific tandem scFv format (Loffler (2000, Blood, Volume 95, Number 6) or WO 99/54440). It consists of two different binding portions directed at (i) CD19 on the surface of normal and malignant human B cells and (ii) CD3 on human T cells. By crosslinking CD3 on T cells with CD19 on B cells, this construct triggers the redirected lysis of normal and malignant B cells by the cytotoxic activity of T cells. The CD3 epitope recognized by such a conventional CD3 binding molecule is localized on the CD3 epsilon chain, where it only takes the correct conformation if it is embedded within the rest of the epsilon chain and held in the right position by heterodimerization of the epsilon chain with either the CD3 gamma or delta chain. Interaction of this highly context dependent epitope with a conventional CD3 binding molecule (see e.g. Loffler (2000, Blood, Volume 95, Number 6) or WO 99/54440)—even when it occurs in a purely monovalent fashion and without any crosslinking—can induce an allosteric change in the conformation of CD3 leading to the exposure of an otherwise hidden proline-rich region within the cytoplasmic domain of CD3 epsilon. Once exposed, the proline-rich region can recruit the signal transduction molecule Nck2, which is capable of triggering further intracellular signals. Although this is not sufficient for full T cell activation, which definitely requires crosslinking of several CD3 molecules on the T cell surface, e.g. by crosslinking of several anti-CD3 molecules bound to several CD3 molecules on a T cell by several CD19 molecules on the surface of a B cell, pure monovalent interaction of conventional CD3 binding molecules to their context dependent epitope on CD3 epsilon is still not inert for T cells in terms of signaling. Without being bound by theory, monovalent conventional CD3 binding molecules (known in the art) may induce some T cell reactions when infused into humans even in those cases where no circulating target cells are available for CD3 crosslinking. An important T cell reaction to the intravenous infusion of monovalent conventional CD19×CD3 binding molecule into B-NHL patients who have essentially no circulating CD19-positive B cells is the redistribution of T cells after start of treatment. It has been found in a phase I clinical trial that this T cell reaction occurs during the starting phase of intravenous CD19×CD3 binding molecule infusion in all individuals without circulating CD19-positive target B cells essentially independent of the CD19×CD3 binding molecule dose (FIG. 23). However, sudden increases in CD19×CD3 binding molecule exposure have been found to trigger virtually the same redistributional T cell reaction in these patients as the initial exposure of T cells to CD19×CD3 binding molecule at treatment start (FIG. 24A) and even gradual increases in CD19×CD3 binding molecule exposure still can have redistributional effects on circulating T cells (FIG. 25). Moreover, it has been found that this essentially dose-independent redistributional T cell reaction in the absence of circulating target cells as triggered by conventional CD3 binding molecules like the CD19×CD3 binding molecule (e.g. disclosed in WO 99/54440) in 100% of all treated individuals is a major risk factor for adverse events related to the initiation of treatment.

[0541] According to the study protocol, patients with relapsed histologically confirmed indolent B-cell Non-Hodgkin-Lymphoma (B-NHL) including mantle cell lymphoma were recruited in an open-label, multi-center phase I interpatient dose-escalation trial. The study protocol was approved by the independent ethics committees of all participating centers and sent for notification to the responsible regulatory authority. Measurable disease (at least one lesion ≧1.5 cm) as documented by CT scan was required for inclusion into the study. Patients received conventional CD19×CD3 binding molecule by continuous intravenous infusion with a portable minipump system over four weeks at constant flow rate (i.e. dose level). Patients were hospitalized during the first two weeks of treatment before they were released from the hospital and continued treatment at home. Patients without evidence of disease progression after four weeks were offered to continue treatment for further four weeks. So far six different dose levels were tested without reaching a maximum tolerated dose (MTD): 0.5, 1.5, 5, 15, 30 and 60 μg/m²/24 h. Cohorts consisted of three patients each if no adverse events defined by the study protocol as DLT (dose limiting toxicity) were observed. In case of one DLT among the first three patients the cohort was expanded to six patients, which—in the absence of a second DLT—allowed further dose escalation. Accordingly, dose levels without DLT in cohorts with 3 patients or with one DLT in cohorts with 6 patients were regarded as safe. Study treatment was stopped in all patients who developed a DLT. At 15 and 30 μg/m²/24 h different modes of treatment initiation during the first 24 h were tested in several additional cohorts: (i) Stepwise increase after 5 μg/m²/24 h for the first 24 h to 15 pg/m²/24 h maintenance dose (patient cohort 15-step), (ii) even continuous increase of flow-rate from almost zero to 15 or 30 μg/m²/24 h (patient cohorts 15-ramp and 30-ramp) and (iii) start with the maintenance dose from the very beginning (patient cohorts 15-flat, 30-flat and 60-flat). Patient cohorts at dose levels 0.5, 1.5 and 5 μg/m²/24 h were all started with the maintenance dose from the very beginning (i.e. flat initiation).

[0542] Time courses of absolute B- and T-cell counts in peripheral blood were determined by four color FACS analysis as follows:

[0543] Collection of Blood Samples and Routine Analysis

[0544] In patient cohorts 15-ramp, 15-flat, 30-ramp, 30-flat and 60-flat blood samples (6 ml) were obtained before and 0.75, 2, 6, 12, 24, 30, 48 hours after start of CD19×CD3 binding molecule (as disclosed in WO 99/54440) infusion as well as on treatment days 8, 15, 17, 22, 24, 29, 36, 43, 50, 57 and 4 weeks after end of conventional CD19×CD3 binding molecule infusion using EDTA-containing Vacutainer™ tubes (Becton Dickinson) which were shipped for analysis at 4° C. In patient cohorts 15-step blood samples (6 ml) were obtained before and 6, 24, 30, 48 hours after start of CD19×CD3 binding molecule infusion as well as on treatment days 8, 15, 22, 29, 36, 43, 50, 57 and 4 weeks after end of CD19×CD3 binding molecule infusion. At dose levels 0.5, 1.5 and 5 μg/m²/24 h blood samples (6 ml) were obtained before and 6, 24, 48 hours after start of CD19×CD3 binding molecule infusion as well as on treatment days 8, 15, 22, 29, 36, 43, 50, 57 and 4 weeks after end of CD19×CD3 binding molecule infusion. In some cases slight variations of these time points occurred for operational reasons. FACS analysis of lymphocyte subpopulations was performed within 24-48 h after blood sample collection. Absolute numbers of leukocyte subpopulations in the blood samples were determined through differential blood analysis on a CoulterCounter™ (Coulter).

[0545] Isolation of PBMC from Blood Samples

[0546] PBMC (peripheral blood mononuclear cells) isolation was performed by an adapted Ficoll™ gradient separation protocol. Blood was transferred at room temperature into 10 ml Leucosep™ tubes (Greiner) pre-loaded with 3 ml Biocoll™0 solution (Biochrom). Centrifugation was carried out in a swing-out rotor for 15 min at 1700×g and 22° C. without deceleration. The PBMC above the Biocoll™ layer were isolated, washed once with FACS buffer (PBS/2% FBS [Foetal Bovine Serum; Biochrom]), centrifuged and resuspended in FACS buffer. Centrifugation during all wash steps was carried out in a swing-out rotor for 4 min at 800×g and 4° C. If necessary, lysis of erythrocytes was performed by incubating the isolated PBMC in 3 ml erythrocyte lysis buffer (8.29 g NH₄Cb, 1.00 g KHCO₃, 0.037 g EDTA, ad 1.0 l H₂O_{bidest}, pH 7.5) for 5 min at room temperature followed by a washing step with FACS buffer.

[0547] Staining of PBMC with Fluorescence-Labeled Antibodies Against Cell Surface Molecules

[0548] Monoclonal antibodies were obtained from Invitrogen (¹Cat. No. MHCD1301, ²Cat. No. MHCD1401), Dako (⁵Cat. No. C7224) or Becton Dickinson (³Cat. No. 555516, ⁴Cat. No. 345766) used according to the manufacturers' recommendations. 5×10⁵-1×10⁶ cells were stained with the following antibody combination: anti-CD13¹/anti-CD14² (FITC)×anti-CD56³ (PE)×anti-CD3⁴ (PerCP)×anti-CD19⁵ (APC). Cells were pelleted in V-shaped 96 well multititer plates (Greiner) and the supernatant was removed. Cell pellets were resuspended in a total volume of 100 μl containing the specific antibodies diluted in FACS buffer. Incubation was carried out in the dark for 30 min at 4° C. Subsequently, samples were washed twice with FACS buffer and cell pellets were resuspended in FACS buffer for flow cytometric analysis.

[0549] Flowcytometric Detection of Stained Lymphocytes by FACS

[0550] Data collection was performed with a 4 color BD FACSCalibur™ (Becton Dickinson). For each measurement 1×10⁴ cells of defined lymphocyte subpopulations were acquired. Statistical analysis was performed with the program CellQuest Pro™ (Becton Dickinson) to obtain lymphocyte subpopulation percentages and to classify cell surface molecule expression intensity. Subsequently, percentages of single lymphocyte subsets related to total lymphocytes (i.e. B plus T plus NK cells excluding any myeloid cells via CD13/14-staining) as determined by FACS were correlated with the lymphocyte count from the differential blood analysis to calculate absolute cell numbers of T cells (CD3⁺, CD56⁻, CD13/14⁻) and B cells (CD19⁺, CD13/14⁻).

[0551] T cell redistribution during the starting phase of conventional CD19×CD3 binding molecule (e.g. disclosed in WO 99/54440) treatment in all those patients who had essentially no circulating CD19-positive B cells at treatment start is shown in (FIG. 23). For comparison, a representative example of T cell redistribution during the starting phase of CD19×CD3 binding molecule treatment in a patient with a significant number of circulating CD19-positive B cells is shown in FIG. 26.

[0552] In both cases (i.e. essentially no or many circulating B cells) circulating T cell counts rapidly decrease upon treatment start. However, in the absence of circulating B cells T cells tend to return into the circulating blood very early, while the return of T cells into the circulating blood of those patients who have a significant number of circulating B cells at treatment start is usually delayed until these circulating B cells are depleted. Thus, the T cell redistribution patterns mainly differ in the kinetics of T cell reappearance in the circulating blood.

[0553] Assessment of efficacy based on CT scan was carried out by central reference radiology after 4 weeks of treatment and in patients receiving additional 4 weeks also after 8 weeks of treatment plus in all cases four weeks after end of treatment. Disappearance and/or normalization in size of all known lesions (including an enlarged spleen) plus clearance of bone marrow from lymphoma cells in cases of bone marrow infiltration was counted as complete response (CR). Reduction by at least 50% from baseline of the sum of products of the two biggest diameters (SPD) of each predefined target lesion was defined as partial response (PR); a reduction by at least 25% was regarded a minimal response (MR). Progressive disease (PD) was defined as ≧50% increase of SPD from baseline. SPD deviations from baseline between +50% and −25% were regarded as stable disease (SD).

[0554] Patient demographics, doses teceived and clinical outcome in 34 patients are summarized in Table 4. Clinical anti-tumor activity of the CD19×CD3 binding molecule was clearly dose dependent: Consistent depletion of circulating CD19-positive B (lymphoma) cell from peripheral blood was observed from 5 μg/m²/24 h onwards. At 15 μg/m²/24 h and 30 μg/m²/24 h first objective clinical responses (PRs and CRs) were recorded as well as cases of partial and complete elimination of B lymphoma cells from infiltrated bone marrow. Finally, at 60 μg/m²/24 h the response rate increased to 100% (PRs and CRs) and bone marrow clearance from B lymphoma cells was complete in all evaluable cases.

[0555] The CD19×CD3 binding molecule was well tolerated by the majority of patients. Most frequent adverse events of grades 1-4 in 34 patients, regardless of causality are summarized in Table 5. CD19×CD3 binding molecule-related adverse events usually were transient and fully reversible. In particular, there were 2 patients (patients #19 and #24 in Table 4) essentially without circulating CD19-positive B cells whose treatment was stopped early because of CNS adverse events (lead symptoms: confusion and disorientation) related to repeated T cell redistribution during the starting phase of CD19×CD3 binding molecule infusion.

[0556] One of these patients (#19) was in cohort 15-step. He received 5 μg/m²/24 h CD19×CD3 binding molecule for the first 24 h followed by sudden increase to 15 μg/m²/24 h maintenance dose. The corresponding T cell redistribution pattern shows that circulating T cell counts rapidly decreased upon start of infusion at 5 μg/m²/24 h followed by early reappearance of T cells in the circulating blood essentially without circulating CD19-positive B cells. As a consequence, the peripheral T cell counts had fully recovered when the CD19×CD3 binding molecule dose was increased after 24 h from 5 to 15 μg/m²/24 h. Therefore the dose step could trigger a second episode of T cell redistribution as shown in FIG. 24A. This repeated T cell redistribution was related with CNS side effects (lead symptoms: confusion and disorientation) in this patient, which led to the stop of infusion. The relationship between repeated T cell redistribution and such CNS adverse events was also observed in previous phase I clinical trials in B-NHL patients who received CD19×CD3 binding molecule (e.g. disclosed in WO 99/54440) as repeated bolus infusion for 2 to 4 hours each usually followed by 2 days of treatment free interval (FIG. 24B). Every single bolus infusion triggered one episode of T cell redistribution consisting of a fast decrease in circulating T cell counts and T cell recovery prior to the next bolus infusion. In total, CNS adverse events related to repeated T cell redistribution were observed in 5 out of 21 patients. FIG. 24B shows the representative example of one patient from the bolus infusion trials, who developed CNS symptoms after the third episode of T cell redistribution. Typically, patients with CNS adverse events in the bolus infusion trials also had low circulating B cell counts.

[0557] The second patient (#24) from the continuous infusion trial, whose treatment was stopped early because of CNS adverse events (lead symptoms: confusion and disorientation) related to repeated T cell redistribution during the starting phase of CD19×CD3 binding molecule infusion, was in cohort 15-flat. By mistake, this patient received an CD19×CD3 binding molecule infusion without additional HSA as required for stabilization of the drug. The resulting uneven drug flow triggered repeated episodes of T cell redistribution instead of only one (FIG. 27A) with the consequence that the infusion had to be stopped because of developing CNS symptoms. Yet, when the same patient was restarted correctly with CD19×CD3 binding molecule solution containing additional HSA for drug stabilization (e.g. disclosed in WO 99/54440), no repeated T cell redistribution was observed and the patient did not again develop any CNS symptoms (FIG. 27B). Because this patient also had essentially no circulating B cells, the circulating T cells could react with fast redistribution kinetics even to subtle changes in drug exposure as observed. The CNS adverse events related to T cell redistribution in patients who have essentially no circulating target cells can be explained by a transient increase of T cell adhesiveness to the endothelial cells followed by massive simultaneous adhesion of circulating T cells to the blood vessel walls with a consecutive drop of T cell numbers in the circulating blood as observed. The massive simultaneous attachment of T cells to the blood vessel walls can cause an increase in endothelial permeability and endothelial cell activation. The consequences of increased endothelial permeability are fluid shifts from the intravascular compartment into interstitial tissue compartments including the CNS interstitium. Endothelial cell activation by attached T cells can have procoagulatory effects (Monaco et al. J Leukoc Biol 71 (2002) 659-668) with possible disturbances in blood flow (including cerebral blood flow) particularly with regard to capillary microcirculation. Thus, CNS adverse events related to T cell redistribution in patients essentially without circulating target cells can be the consequence of capillary leak and/or disturbances in capillary microcirculation through adherence of T cells to endothelial cells. The endothelial stress caused by one episode of T cell redistribution is tolerated by the majority of patients, while the enhanced endothelial stress caused by repeated T cell redistribution frequently causes CNS adverse events. More than one episode of T cell redistribution may be less risky only in patients who have low baseline counts of circulating T cells. However, also the limited endothelial stress caused by one episode of T cell redistribution can cause CNS adverse events in rare cases of increased susceptibility for such events as observed in 1 out of 21 patients in the bolus infusion trials with the CD19×CD3 binding molecule.

[0558] Without being bound by theory, the transient increase of T cell adhesiveness to the endothelial cells in patients who have essentially no circulating target cells can be explained as T cell reaction to the monovalent interaction of a conventional CD3 binding molecule, like the CD19×CD3 binding molecule (e.g. WO 99/54440), to its context dependent epitope on CD3 epsilon resulting in an allosteric change in the conformation of CD3 followed by the recruitment of Nck2 to the cytoplasmic domain of CD3 epsilon as described above. As Nck2 is directly linked to integrins via PINCH and ILK (FIG. 28), recruitment of Nck2 to the cytoplasmic domain of CD3 epsilon following an allosteric change in the conformation of CD3 through binding of a conventional CD3 binding molecule, like the CD19×CD3 binding molecule, to its context dependent epitope on CD3 epsilon, can increase the adhesiveness of T cells to endothelial cells by transiently switching integrins on the T cell surface into their more adhesive isoform via inside-out-signalling.

TABLE 4
Patient demographics and clinical outcome

| | | | Disease | | | Best Response* |
|---|---|---|---|---|---|---|
| | | Age/ | (Ann Arbor | Dose Level | Clearance of | (CR Duration in |
| Cohort | Patient | Sex | Classification) | [mg/m²/Day] | Bone Marrow | Months or Weeks) |
| 1 | 1 | 71/m | IC, Binet C | 0.0005 | None | SD |
| | 2 | 67/f | MCL, Stage | 0.0005 | n.d. | PD |
| | | | IV/A/E | | | |
| | 3 | 67/m | CLL, Stage | 0.0005 | n.d. | MR |
| | | | IV/B/E | | | |
| 2 | 4 | 69/m | MCL, Stage | 0.0015 | n.i. | SD |
| | | | IV/B | | | |
| | 5 | 49/m | MCL, Stage | 0.0015 | n.d. | SD |
| | | | IV/A/S | | | |
| | 6 | 71/m | MCL, Stage | 0.0015 | n.i. | PD |
| | | | IV/B/E | | | |
| | 7 | 77/m | MCL, Stage | 0.0015 | n.i. | SD |
| | | | IV/B/E/S | | | |
| | 8 | 65/m | CLL, Stage | 0.0015 | n.d. | PD |
| | | | IV/B/E/S | | | |
| | 9 | 75/m | FL, Stage | 0.0015 | n.i. | SD |
| | | | II/B | | | |
| 3 | 10 | 58/m | MCL, Stage | 0.005 | n.i. | PD |
| | | | III/B/S | | | |
| | 11 | 68/f | FL, Stage | 0.005 | n.d. | SD |
| | | | IV/B | | | |
| | 12 | 65/m | MCL, Stage | 0.005 | n.i. | SD |
| | | | III/A/E | | | |
| 4^{a} | 13 | 60/m | SLL, Stage | 0.015 | Complete | PR |
| | | | IV/B/S | | | |
| | 14 | 73/m | MCL, Stage | 0.015 | n.i. | SD |
| | | | II/A/E | | | |
| | 15 | 44/m | FL, Stage | 0.015 | Partial | PR |
| | | | IV/B/E/S | | | |
| | 16 | 61/m | FL, Stage | 0.015 | Complete | CR (7 mo) |
| | | | IV/A/S | | | |
| | 17 | 67/m | MZL, Stage | 0.015 | n.i. | n.e. |
| | | | IV/B/S | | | |
| | 18 | 64/m | FL, Stage | 0.015 | n.i. | PD |
| | | | IV/A/E | | | |
| | 19 | 75/m | MCL, Stage | 0.015 | n.i. | n.e. |
| | | | III/A | | | |
| | 20 | 65/f | FL; Stage | 0.015 | n.i. | SD |
| | | | III/A | | | |
| | 21 | 60/m | MCL, Stage | 0.015 | None | SD |
| | | | IV/A/E | | | |
| | 22 | 67/f | FL, Stage | 0.015 | Complete | MR |
| | | | IV/B | | | |
| | 23 | 67/m | DLBCL, Stage | 0.015 | n.i. | n.e. |
| | | | III/B | | | |
| | 24 | 65/f | FL, Stage | 0.015 | n.d. | SD |
| | | | III/A | | | |
| | 25 | 74/f | WD, Stage | 0.015 | Partial | SD |
| | | | IV/B | | | |
| 5 | 26 | 67/m | MCL, Stage | 0.03 | Complete | SD |
| | | | IV/A | | | |
| | 27 | 48/m | FL, Stage | 0.03 | n.i. | PD |
| | | | III/A | | | |
| | 28 | 58/m | MCL, Stage | 0.03 | n.i. | CR (10 mo+) |
| | | | III/A | | | |
| | 29 | 45/f | MCL, Stage | 0.03 | Partial | PD |
| | | | IV/B | | | |
| | 30 | 59/m | MZL, Stage | 0.03 | n.i. | n.e. |
| | | | III/A | | | |
| | 31 | 43/m | FL, Stage | 0.03 | n.i. | MR |
| | | | III/A | | | |
| 6 | 32 | 72/m | MCL, Stage | 0.06 | Complete | PR |
| | | | IV/A | | | |
| | 33 | 55/m | MCL, Stage | 0.06 | Complete | CR (4 mo+) |
| | | | IV/B | | | |
| | 34 | 52/m | FL, Stage | 0.06 | n.i. | CR^{b} (1 w+) |
| | | | IV/A | | | |

*Centrally confirmed complete (CR) and partial (PR) responses by Cheson criteria in bold; MR, minimal response (≧25 to <50%); SD, stable disease; PD, progressive disease; duration from first documentation of response in parentheses; + denotes an ongoing response
^{a}Cohort 4 was expanded to study three different schedules of treatment initiation
^{b}PR after 8 weeks of treatment that turned into a CR after an additional treatment cycle of 4 weeks at the same dose following 7 weeks of treatment free interval
n.e.: not evaluable, because of treatment period <7 d
n.d.: not determined (infiltrated, but no second biopsy performed at end of treatment)
n.i.: not infiltrated at start of treatment

TABLE 5
Incidence of adverse events observed during treatment

| Adverse events regardless of relationship, | | |
|---|---|---|
| occuring in ≧3 patients | Grade 1-4 | Grade 3-4 |
| (N = 34) | N (%) | N (%) |
| Pyrexia | 22 (64.7) | 2 (5.9) |
| Leukopenia | 21 (61.8) | 11 (32.4) |
| Lymphopenia | 21 (61.8) | 21 (61.8) |
| Coagulopathy (increase in D-dimers) | 16 (47.1) | 6 (17.6) |
| Enzyme abnormality (AP, LDH, CRP) | 16 (47.1) | 10 (29.4) |
| Hepatic function abnormality (ALT, AST, GGT) | 16 (47.1) | 1 (2.9) |
| Anaemia | 13 (38.2) | 5 (14.7) |
| Chills | 13 (38.2) | 0 (0.0) |
| Headache | 12 (35.3) | 1 (2.9) |
| Hypokalaemia | 12 (35.3) | 2 (5.9) |
| Thrombocytopenia | 12 (35.3) | 6 (17.6) |
| Weight increased | 12 (35.3) | 0 (0.0) |
| Hyperglycaemia | 11 (32.4) | 2 (5.9) |
| Neutropenia | 11 (32.4) | 8 (23.5) |
| Haematuria | 10 (29.4) | 0 (0.0) |
| Oedema peripheral | 10 (29.4) | 2 (5.9) |
| Anorexia | 9 (26.5) | 1 (2.9) |
| Diarrhoea | 9 (26.5) | 0 (0.0) |
| Weight decreased | 9 (26.5) | 0 (0.0) |
| Fatigue | 8 (23.5) | 1 (2.9) |
| Proteinuria | 8 (23.5) | 0 (0.0) |
| Hypocalcaemia | 7 (20.6) | 2 (5.9) |
| Pancreatic enzyme abnormality | 7 (20.6) | 0 (0.0) |
| Cough | 6 (17.6) | 0 (0.0) |
| Dyspnoea | 6 (17.6) | 0 (0.0) |
| Back pain | 5 (14.7) | 0 (0.0) |
| Catheter site pain | 5 (14.7) | 0 (0.0) |
| Hyperbilirubinaemia | 5 (14.7) | 2 (5.9) |
| Hyoalbuminaemia | 5 (14.7) | 0 (0.0) |
| Hypogammaglobulinaemia | 5 (14.7) | 1 (2.9) |
| Hypoproteinaemia | 5 (14.7) | 0 (0.0) |
| Pleural effusion | 5 (14.7) | 1 (2.9) |
| Vomiting | 5 (14.7) | 0 (0.0) |
| Asthenia | 4 (11.8) | 1 (2.9) |
| Confusional state | 4 (11.8) | 0 (0.0) |
| Constipation | 4 (11.8) | 0 (0.0) |
| Dizziness | 4 (11.8) | 0 (0.0) |
| Hypertension | 4 (11.8) | 0 (0.0) |
| Hyponatraemia | 4 (11.8) | 2 (5.9) |
| Mucosal dryness | 4 (11.8) | 0 (0.0) |
| Muscle spasms | 4 (11.8) | 0 (0.0) |
| Nausea | 4 (11.8) | 0 (0.0) |
| Night sweats | 4 (11.8) | 0 (0.0) |
| Abdominal pain | 3 (8.8) | 1 (2.9) |
| Ascites | 3 (8.8) | 0 (0.0) |
| Hypercoagulation | 3 (8.8) | 0 (0.0) |
| Hyperhidrosis | 3 (8.8) | 0 (0.0) |
| Hypoglobulinaemia | 3 (8.8) | 0 (0.0) |
| Insomnia | 3 (8.8) | 0 (0.0) |
| Liver disorder | 3 (8.8) | 1 (2.9) |
| Nasopharyngitis | 3 (8.8) | 0 (0.0) |
| Pruritus | 3 (8.8) | 0 (0.0) |

[0559] Abbreviations used are: AE, adverse event; AP, alkaline phosphatase; LDH, lactate dehydrogenase; CRP, C-reactive protein; ALT, alanine transaminase; AST, aspartate transaminase; GGT, gamma-glutamyl transferase; AE data from the additional treatment cycle of patient 34 not yet included.

[0560] As explained above, conventional CD3 binding molecules (e.g. disclosed in WO 99/54440) capable of binding to a context-dependent epitope, though functional, lead to the undesired effect of T cell redistribution in patients causing CNS adverse events. In contrast, binding molecules of the present invention, by binding to the context-independent N-terminal 1-27 amino acids of the CD3 epsilon chain, do not lead to such T cell redistribution effects. As a consequence, the CD3 binding molecules of the invention are associated with a better safety profile compared to conventional CD3 binding molecules.

[0561] 21. Bispecific CD3 Binding Molecules of the Invention Inducing T cell Mediated Target Cell Lysis by Recognizing a Surface Target Antigen Deplete Target Antigen Positive Cells in vivo

[0562] A Bispecific CD3 Binding Molecule of the Invention Recognizing CD33 as Target Antigen Depletes CD33-Positive Circulating Monocytes from the Peripheral Blood of Cynomolgus Monkeys

[0563] CD33-AF5 VH-VL×I2C VH-VL (amino acid sequence: SEQ ID NO.415) was produced by expression in CHO cells using the coding nucleotide sequence SEQ ID NO. 416. The coding sequences of (i) an N-terminal immunoglobulin heavy chain leader comprising a start codon embedded within a Kozak consensus sequence and (ii) a C-terminal His₆-tag followed by a stop codon were both attached in frame to the nucleotide sequence SEQ ID NO 416 prior to insertion of the resulting DNA-fragment as obtained by gene synthesis into the multiple cloning site of the expression vector pEF-DHFR (Raum et al. Cancer Immunol Immunother 50 (2001) 141-150). Stable transfection of DHFR-deficient CHO cells, selection for DHFR-positive transfectants secreting the CD3 binding molecule CD33-AF5 VH-VL×I2C VH-VL into the culture supernatant and gene amplification with methotrexat for increasing expression levels were carried out as described (Mack et al. Proc. Natl. Acad. Sci. USA 92 (1995) 7021-7025). Test material for treatment of cynomolgus monkeys was produced in a 20-liter fermenter. Protein purification from the harvest of 3 production runs was based on IMAC affinity chromatography targeting the C-terminal His6-tag of CD33-AF5 VH-VL×I2C VH-VL followed by preparative size exclusion chromatography (SEC). The total yield of final endotoxin-free test material was 60 mg. The analytical SEC-profile of CD33-AF5 VH-VL×I2C VH-VL for use in cynomolgus monkeys revealed that the test material almost exclusively consisted of monomer. The potency of the test material was measured in a cytotoxicity assay as described in example 23.5 using CHO cells transfected with cynomolgus CD33 as target cells and the macaque T cell line 4119LnPx as source of effector cells (FIG. 29). The concentration of CD33-AF5 VH-VL×I2C VH-VL required for half-maximal target cell lysis by the effector T cells (EC50) was determined to be 2.7 ng/ml.

[0564] Young (approx. 3 years old) adult cynomolgus monkeys (Macaca fascicularis) were treated by continuous intravenous infusion of CD3 binding molecule CD33-AF5 VH-VL×I2C VH-VL at different flow-rates (i.e. dose levels) to study depletion of circulating CD33-positive monocytes from the peripheral blood. This situation is equivalent to the treatment with the conventional CD3 binding molecule CD19×CD3 (specific for CD19 on B cells and CD3 on T cells) of those B-NHL patients, who have circulating CD19-positive target B cells (see e.g. WO99/54440). Depletion of circulating CD19-positive target B cells from the peripheral blood had turned out as a valid surrogate for the general clinical efficacy of the conventional CD3 binding molecule (CD19×CD3 as provided in WO99/54440) in patients with CD19-positive B-cell malignomas like B-NHL. Likewise, depletion of circulating CD33-positive monocytes from the peripheral blood is regarded as a valid surrogate of the general clinical efficacy of CD33-directed bispecific CD3 binding molecules of the invention like CD33-AF5 VH-VL×I2C VH-VL in patients with CD33-positive myeloid malignomas like AML (acute myeloid leukemia).

[0565] Continuous infusion was carried out according to the Swivel method as follows: The monkeys are catheterized via the vena femoralis into the vena cava caudalis using a vein catheter. The catheter is tunneled subcutaneously to the dorsal shoulder region and exteriorized at the caudal scapula. Then a tube is passed through a jacket and a protection spring. The jacket is fastened around the animal and the catheter, via the tube, is connected to an infusion pump.

[0566] Administration solution (1.25 M lysine, 0.1% tween 80, pH 7) without test material was infused continuously at 48 ml/24 h for 7 days prior to treatment start to allow acclimatization of the animals to the infusion conditions. Treatment was started by adding CD33-AF5 VH-VL×I2C VH-VL test material to the administration solution at the amount required for each individual dose level to be tested (i.e. flow rate of CD33-AF5 VH-VL×I2C VH-VL). The infusion reservoir was changed every day throughout the whole acclimatization and treatment phase. Planned treatment duration was 7 days except for the 120 μg/m²/24 h dose level, where animals received 14 days of treatment.

[0567] Time courses of absolute counts in circulating T cells and CD33-positive monocytes were determined by 4- or 3-colour FACS analysis, respectively:

[0568] Collection of Blood Samples and Routine Analysis

[0569] Blood samples (1 ml) were obtained before and 0.75, 2, 6, 12, 24, 30, 48, 72 hours after start of continuous infusion with MCSP-G4 VH-VL×I2C VH-VL as well as after 7 and 14 days (and after 9 days at the 120 μg/m²/24 h dose level) of treatment using EDTA-containing Vacutainer™ tubes (Becton Dickinson) which were shipped for analysis at 4° C. In some cases slight variations of these time points occurred for operational reasons. FACS analysis of lymphocyte subpopulations was performed within 24-48 h after blood sample collection. Absolute numbers of leukocyte subpopulations in the blood samples were determined through differential blood analysis in a routine veterinary lab.

[0570] Isolation of PBMC from Blood Samples

[0571] PBMC (peripheral blood mononuclear cells) isolation was performed by an adapted Ficoll™ gradient separation protocol. Blood was transferred at room temperature into 5 ml Falcon™ tubes pre-loaded with 1 ml Biocoll™ solution (Biochrom). Centrifugation was carried out in a swing-out rotor for 15 min at 1700×g and 22° C. without deceleration. The PBMC above the Biocoll™ layer were isolated, washed once with FACS buffer (PBS/2% FBS [Foetal Bovine Serum; Biochrom]), centrifuged and resuspended in FACS buffer. Centrifugation during all wash steps was carried out in a swing-out rotor for 4 min at 800×g and 4° C. If necessary, lysis of erythrocytes was performed by incubating the isolated PBMC in 3 ml erythrocyte lysis buffer (8.29 g NH₄Cl, 1.00 g KHCO₃, 0.037 g EDTA, ad 1.0 l H₂O_{bidest}, pH 7.5) for 5 min at room temperature followed by a washing step with FACS buffer.

[0572] Staining of PBMC with Fluorescence-Labeled Antibodies Against Cell Surface Molecules

[0573] Monoclonal antibodies reactive with cynomolgus antigens were obtained from Becton Dickinson (¹Cat. No. 345784, ²Cat. No. 556647, ³Cat. No. 552851, ⁶Cat. No. 557710), Beckman Coulter (⁴Cat. No. IM2470) and Miltenyi (⁵Cat. No. 130-091-732) and used according to the manufacturers' recommendations. 5×10⁵-1×10⁶ cells were stained with the following antibody combinations: anti-CD14¹ (FITC)×anti-CD56² (PE)×anti-CD3³ (PerCP)×anti-CD19⁴ (APC) and anti-CD14¹ (FITC)×anti-CD33⁵ (PE)×anti-CD16⁶ (Alexa Fluor 647™). Cells were pelleted in V-shaped 96 well multititer plates (Greiner) and the supernatant was removed. Cell pellets were resuspended in a total volume of 100 μl containing the specific antibodies diluted in FACS buffer. Incubation was carried out in the dark for 30 min at 4° C. Subsequently, samples were washed twice with FACS buffer and cell pellets were resuspended in FACS buffer for flow cytometric analysis.

[0574] Flowcytometric Detection of Stained Lymphocytes by FACS

[0575] Data collection was performed with a 4 color BD FACSCalibur™ (Becton Dickinson). For each measurement 1×10⁴ cells of defined lymphocyte subpopulations were acquired. Statistical analysis was performed with the program CellQuest Pro™ (Becton Dickinson) to obtain lymphocyte subpopulation percentages and to classify cell surface molecule expression intensity. Subsequently, percentages of single lymphocyte subsets related to total lymphocytes (i.e. B plus T plus NK cells excluding myeloid cells via CD14-staining) as determined by FACS were correlated with the lymphocyte count from the differential blood analysis to calculate absolute cell numbers of T cells (CD3⁺, CD56⁻, CD14⁻). Absolute numbers of CD33-positive monocytes were calculated by multiplying the monocyte counts from the differential blood analysis with the corresponding ratios of CD33-positive monocytes (CD33⁺, CD14⁺) to all monocytes (CD14⁺) as determined by FACS.

[0576] The percentage compared to baseline (i.e. 100%) of absolute circulating CD33-positive monocyte counts at the end of treatment with CD33-AF5 VH-VL×I2C VH-VL in 4 cohorts of 2 cynomolgus monkeys with inter-cohort dose escalation from 30 over 60 and 240 to 1000 μg/m²/24 h are shown in FIG. 30A.

[0577] As shown in FIG. 30A, continuous intravenous infusion of CD33-AF5 VH-VL×I2C VH-VL induces depletion of circulating CD33-positive monocytes in a dose-dependent manner. While there was still no detectable depletion of circulating CD33-positive monocytes at 30 μg/m²/24 h, a first trend towards a reduction of CD33-positive monocyte counts became visible at 60 μg/m²/24 h after 7 days of treatment. At 240 μg/m²/24 h circulating CD33-positive monocytes were almost completely depleted from the peripheral blood after 3 days of treatment. This was reached even faster at 1000 μg/m²/24 h, where depletion of the circulating CD33-positive monocytes from the peripheral blood was completed already after 1 day of treatment. This finding was confirmed by the results shown in FIG. 30B demonstrating depletion of circulating CD33-positive monocytes by two thirds and 50% compared to the respective baseline in two cynomolgus monkeys treated by continuous infusion with CD33-AF5 VH-VL×I2C VH-VL at 120 μg/m²/24 h for 14 days.

[0578] This outcome is a clear signal clinical efficacy of the CD3 binding molecules of the invention in general and of bispecific CD33-directed CD3 binding molecules of the invention for the treatment of CD33-positive malignomas like AML in particularly. Moreover, the T cell redistribution during the starting phase of treatment with CD33-AF5 VH-VL×I2C VH-VL in the presence of circulating target cells (i.e. CD33-positive monocytes) seems to be less pronounced than T cell redistribution during the starting phase of treatment with conventional CD19×CD3 constructs, as described in WO99/54440 in B-NHL patients with a significant number of circulating target cells (i.e. CD19-positive B cells) as shown in FIG. 26. While T cells disappear completely from the circulation upon start of CD19×CD3 infusion and do not reappear until the circulating CD19-positive target B cells are depleted from the peripheral blood (FIG. 26), initial disappearance of circulating T cells is incomplete upon infusion start with CD33-AF5 VH-VL×I2C VH-VL and T cell counts recover still during the presence of circulating CD33-positive target cells (FIG. 30B). This confirms that CD3 binding molecules of the invention (directed against and generated against an epitope of human and non-chimpanzee primates CD3ε (epsilon) chain and being a part or fragment or the full length of the amino acid sequence as provided in SEQ ID Nos. 2, 4, 6, or 8) by recognizing a context-independent CD3 epitope show a more favorable T cell redistribution profile than conventional CD3 binding molecules recognizing a context-dependent CD3 epitope, like the binding molecules provided in WO99/54440.

[0579] 22. CD3 Binding Molecules of the Invention Directed at Essentially Context Independent CD3 Epitopes by Inducing Less Redistribution of Circulating T Cells in the Absence of Circulating Target Cells Reduce the Risk of Adverse Events Related to the Initiation of Treatment

[0580] Reduced T Cell Redistribution in Cynomolgus Monkeys Following Initiation of Treatment with a Representative Cross-Species Specific CD3 Binding Molecule of the Invention

[0581] MCSP-G4 VH-VL×I2C VH-VL (amino acid sequence: SEQ ID NO. 313) was produced by expression in CHO cells using the coding nucleotide sequence SEQ ID NO. 314. The coding sequences of (i) an N-terminal immunoglobulin heavy chain leader comprising a start codon embedded within a Kozak consensus sequence and (ii) a C-terminal His6-tag followed by a stop codon were both attached in frame to the nucleotide sequence SEQ ID NO. 314 prior to insertion of the resulting DNA-fragment as obtained by gene synthesis into the multiple cloning site of the expression vector pEF-DHFR (Raum et al. Cancer Immunol Immunother 50 (2001) 141-150). Stable transfection of DHFR-deficient CHO cells, selection for DHFR-positive transfectants secreting the CD3 binding molecule MCSP-G4 VH-VL×I2C VH-VL into the culture supernatant and gene amplification with methotrexat for increasing expression levels were carried out as described (Mack et al. Proc. Natl. Acad. Sci. USA 92 (1995) 7021-7025). Test material for treatment of cynomolgus monkeys was produced in a 200-liter fermenter. Protein purification from the harvest was based on IMAC affinity chromatography targeting the C-terminal His6-tag of MCSP-G4 VH-VL×I2C VH-VL followed by preparative size exclusion chromatography (SEC). The total yield of final endotoxin-free test material was 40 mg. The test material consisted of 70% monomer, 30% dimer and a small contamination of higher multimer. The potency of the test material was measured in a cytotoxicity assay as described in example 18 using CHO cells transfected with cynomolgus MCSP as target cells and the macaque T cell line 4119LnPx as source of effector cells (FIG. 31). The concentration of MCSP-G4 VH-VL×I2C VH-VL required for half-maximal target cell lysis by the effector T cells (EC50) was determined to be 1.9 ng/ml.

[0582] Young (approx. 3 years old) adult cynomolgus monkeys (Macaca fascicularis) were treated by continuous intravenous infusion of CD3 binding molecule MCSP-G4 VH-VL×I2C VH-VL at different flow-rates (i.e. dose levels) to study redistribution of circulating T cells following initiation of treatment in the absence of circulating target cells. Although the CD3 binding molecule MCSP-G4 VH-VL×I2C VH-VL can recognize both cynomolgus MCSP and cynomolgus CD3, there are no circulating blood cells expressing MCSP. Therefore, the only interaction possible in the circulating blood is binding of the CD3-specific arm of MCSP-G4 VH-VL×I2C VH-VL to CD3 on T cells. This situation is equivalent to the treatment with the conventional CD3 binding molecule (CD19×CD3 binding molecule specific for CD19 on B cells and CD3 on T cells) of those B-NHL patients, who have no circulating CD19-positive target B cells as described in example 20.

[0583] Continuous infusion was carried out according to the Swivel method as follows: The monkeys are catheterized via the vena femoralis into the vena cava caudalis using a vein catheter. The catheter is tunneled subcutaneously to the dorsal shoulder region and exteriorized at the caudal scapula. Then a tube is passed through a jacket and a protection spring. The jacket is fastened around the animal and the catheter, via the tube, is connected to an infusion pump.

[0584] Administration solution (1.25 M lysine, 0.1% tween 80, pH 7) without test material was infused continuously at 48 ml/24 h for 7 days prior to treatment start to allow acclimatization of the animals to the infusion conditions. Treatment was started by adding MCSP-G4 VH-VL×I2C VH-VL test material to the administration solution at the amount required for each individual dose level to be tested (i.e. flow rate of MCSP-G4 VH-VL×I2C VH-VL). The infusion reservoir was changed every day throughout the whole acclimatization and treatment phase. Treatment duration was 7 days.

[0585] Time courses of absolute T-cell counts in peripheral blood were determined by four color FACS analysis as follows:

[0586] Collection of Blood Samples and Routine Analysis

[0587] Blood samples (1 ml) were obtained before and 0.75, 2, 6, 12, 24, 30, 48, 72 hours after start of continuous infusion with MCSP-G4 VH-VL×I2C VH-VL as well as after 7 days of treatment using EDTA-containing Vacutainer™ tubes (Becton Dickinson) which were shipped for analysis at 4° C. In some cases slight variations of these time points occurred for operational reasons. FACS analysis of lymphocyte subpopulations was performed within 24-48 h after blood sample collection. Absolute numbers of leukocyte subpopulations in the blood samples were determined through differential blood analysis in a routine veterinary lab.

[0588] Isolation of PBMC from Blood Samples

[0589] PBMC (peripheral blood mononuclear cells) isolation was performed by an adapted Ficoll™ gradient separation protocol. Blood was transferred at room temperature into 5 ml Falcon™ tubes pre-loaded with 1 ml Biocoll™ solution (Biochrom). Centrifugation was carried out in a swing-out rotor for 15 min at 1700×g and 22° C. without deceleration. The PBMC above the Biocoll™ layer were isolated, washed once with FACS buffer (PBS/2% FBS [Foetal Bovine Serum; Biochrom]), centrifuged and resuspended in FACS buffer. Centrifugation during all wash steps was carried out in a swing-out rotor for 4 min at 800×g and 4° C. If necessary, lysis of erythrocytes was performed by incubating the isolated PBMC in 3 ml erythrocyte lysis buffer (8.29 g NH₄Cl, 1.00 g KHCO₃, 0.037 g EDTA, ad 1.0 l H₂O_{bidest}, pH 7.5) for 5 min at room temperature followed by a washing step with FACS buffer.

[0590] Staining of PBMC with Fluorescence-Labeled Antibodies Against Cell Surface Molecules

[0591] Monoclonal antibodies reactive with cynomolgus antigens were obtained from Becton Dickinson (¹Cat. No. 345784, ²Cat. No. 556647, ³Cat. No. 552851) and Beckman Coulter (⁴Cat. No. IM2470) used according to the manufacturers' recommendations. 5×10⁵-1×10⁶ cells were stained with the following antibody combination: anti-CD14¹ (FITC)×anti-CD56² (PE)×anti-CD3³ (PerCP)×anti-CD19⁴ (APC). Cells were pelleted in V-shaped 96 well multititer plates (Greiner) and the supernatant was removed. Cell pellets were resuspended in a total volume of 100 μl containing the specific antibodies diluted in FACS buffer. Incubation was carried out in the dark for 30 min at 4° C. Subsequently, samples were washed twice with FACS buffer and cell pellets were resuspended in FACS buffer for flow cytometric analysis.

[0592] Flowcytometric Detection of Stained Lymphocytes by FACS

[0593] Data collection was performed with a 4 color BD FACSCalibur™ (Becton Dickinson). For each measurement 1×10⁴ cells of defined lymphocyte subpopulations were acquired. Statistical analysis was performed with the program CellQuest Pro™ (Becton Dickinson) to obtain lymphocyte subpopulation percentages and to classify cell surface molecule expression intensity. Subsequently, percentages of single lymphocyte subsets related to total lymphocytes (i.e. B plus T plus NK cells excluding myeloid cells via CD14-staining) as determined by FACS were correlated with the lymphocyte count from the differential blood analysis to calculate absolute cell numbers of T cells (CD3⁺, CD56⁻, CD14⁻).

[0594] T cell redistribution during the starting phase of treatment with MCSP-G4 VH-VL×I2C VH-VL in cynomolgus monkeys at dose levels of 60, 240 and 1000 μg/m²/24 h is shown in FIG. 32. These animals showed no signs at all of any T cell redistribution during the starting phase of treatment, i.e. T cell counts rather increased than decreased upon treatment initiation. Given that T cell redistribution is consistently observed in 100% of all patients without circulating target cells, upon treatment initiation with the conventional CD3 binding molecule (e.g. CD19×CD3 construct as described in WO 99/54440) against a context dependent CD3 epitope, it was demonstrated that substantially less T cell redistribution in the absence of circulating target cells upon treatment initiation can be observed with a CD3 binding molecule of the invention directed and generated against an epitope of human an non-chimpanzee primate CD3 epsilon chain as defined by the amino acid sequence of anyone of SEQ ID NOs: 2, 4, 6, or 8 or a fragment thereof. This is in clear contrast to CD3-binding molecules directed against a context-dependent CD3 epitope, like the constructs described in WO 99/54440, The binding molecules against context-independent CD3 epitopes, as (inter alia) provided in any one of SEQ ID NOs: 2, 4, 6, or 8 (or fragments of these sequences) provide for this substantially less (detrimental and non-desired) T cell redistribution. Because T cell redistribution during the starting phase of treatment with CD3 binding molecules is a major risk factor for CNS adverse events, the CD3 binding molecules provided herein and capable of recognizing a context independent CD3 epitope have a substantial advantage over the CD3 binding molecules known in the art and directed against context-dependent CD3 epitopes. Indeed none of the cynomolgus monkeys treated with MCSP-G4 VH-VL×I2C VH-VL showed any signs of CNS symptoms.

[0595] The context-independence of the CD3 epitope is provided in this invention and corresponds to the first 27 N-terminal amino acids of CD3 epsilon) or fragments of this 27 amino acid stretch. This context-independent epitope is taken out of its native environment within the CD3 complex and fused to heterologous amino acid sequences without loss of its structural integrity. Anti-CD3 binding molecules as provided herein and generated (and directed) against a context-independent CD3 epitope provide for a surprising clinical improvement with regard to T cell redistribution and, thus, a more favorable safety profile. Without being bound by theory, since their CD3 epitope is context-independent, forming an autonomous self sufficient subdomain without much influence on the rest of the CD3 complex, the CD3 binding molecules provided herein induce less allosteric changes in CD3 conformation than the conventional CD3 binding molecules (like molecules provided in WO 99/54440), which recognize context-dependent CD3 epitopes like molecules provided in WO 99/54440. As a consequence (again without being bound by theory), the induction of intracellular NcK2 recruitment by the CD3 binding molecules provided herein is also reduced resulting in less isoform switch of T cell integrins and less adhesion of T cells to endothelial cells. It is preferred that preparations of CD3 binding molecules of the invention (directed against and generated against a context-independent epitope as defined herein) essentially consists of monomeric molecules. These monomeric molecules are even more efficient (than dimeric or multimeric molecules) in avoiding T cell redistribution and thus the risk of CNS adverse events during the starting phase of treatment.

[0596] 23. Generation and Characterization of CD33 and CD3 Cross-Species Specific Bispecific Single Chain Molecules

[0597] 23.1. Generation of CHO Cells Expressing Human CD33

[0598] The coding sequence of human CD33 as published in GenBank (Accession number NM_{—}001772) was obtained by gene synthesis according to standard protocols. The gene synthesis fragment was designed as to contain first a Kozak site for eukaryotic expression of the construct, followed by a 19 amino acid immunoglobulin leader peptide, followed in frame by the coding sequence of the mature human CD33 protein, followed in frame by the coding sequence of serine glycine dipeptide, a histidine₆-tag and a stop codon (the cDNA and amino acid sequence of the construct is listed under SEQ ID Nos 525 and 526). The gene synthesis fragment was also designed as to introduce restriction sites at the beginning and at the end of the fragment. The introduced restriction sites, EcoRI at the 5′ end and SalI at the 3′ end, were utilised in the following cloning procedures. The gene synthesis fragment was cloned via EcoRI and SalI into a plasmid designated pEF-DHFR (pEF-DHFR is described in Raum et al. Cancer Immunol Immunother 50 (2001) 141-150) following standard protocols. The aforementioned procedures were carried out according to standard protocols (Sambrook, Molecular Cloning; A Laboratory Manual, 3rd edition, Cold Spring Harbour Laboratory Press, Cold Spring Harbour, N.Y. (2001)). A clone with sequence-verified nucleotide sequence was transfected into DHFR deficient CHO cells for eukaryotic expression of the construct. Eukaryotic protein expression in DHFR deficient CHO cells was performed as described by Kaufmann R. J. (1990) Methods Enzymol. 185, 537-566. Gene amplification of the construct was induced by increasing concentrations of methothrexate (MTX) to a final concentration of up to 20 nM MTX.

[0599] 23.2. Generation of CHO Cells Expressing the Extracellular Domain of Macaque CD33

[0600] The cDNA sequence of macaque CD33 was obtained by a set of 3 PCRs on cDNA from macaque monkey bone marrow prepared according to standard protocols. The following reaction conditions: 1 cycle at 94° C. for 3 minutes followed by 35 cycles with 94° C. for 1 minute, 53° C. for 1 minute and 72° C. for 2 minutes followed by a terminal cycle of 72° C. for 3 minutes and the following primers were used:

```
3. forward primer:
      5′-gaggaattcaccatgccgctgctgctactgctgcccctgctgtg
      ggcaggggccctggctatgg-3′
      reverse primer:
      5′-gatttgtaactgtatttggtacttcc-3′
4. forward primer:
      5′-attccgcctccttggggatcc-3′
      reverse primer:
      5′-gcataggagacattgagctggatgg-3′
5. forward primer:
      5′-gcaccaacctgacctgtcagg-3′
      reverse primer:
      5′-agtgggtcgactcactgggtcctgacctctgagtattcg-3′
```

[0601] Those PCRs generate three overlapping fragments, which were isolated and sequenced according to standard protocols using the PCR primers, and thereby provided a portion of the cDNA sequence of macaque CD33 from the second nucleotide of codon +2 to the third nucleotide of codon +340 of the mature protein. To generate a construct for expression of macaque CD33 a cDNA fragment was obtained by gene synthesis according to standard protocols (the cDNA and amino acid sequence of the construct is listed under SEQ ID Nos 527 and 528). In this construct the coding sequence of macaque CD33 from amino acid +3 to +340 of the mature CD33 protein was fused into the coding sequence of human CD33 replacing the human coding sequence of the amino acids +3 to +340. The gene synthesis fragment was also designed as to contain a Kozak site for eukaryotic expression of the construct and restriction sites at the beginning and the end of the fragment containing the cDNA coding for essentially the whole extracellular domain of macaque CD33, the macaque CD33 transmembrane domain and a macaque-human chimeric intracellular CD33 domain. The introduced restriction sites XbaI at the 5′ end and SalI at the 3′ end, were utilised in the following cloning procedures. The gene synthesis fragment was then cloned via XbaI and SalI into a plasmid designated pEF-DHFR (pEF-DHFR is described in Raum et al. Cancer Immunol Immunother 50 (2001) 141-150). A sequence verified clone of this plasmid was used to transfect CHO/dhfr− cells as described above.

[0602] 23.3. Generation of CD33 and CD3 Cross-Species Specific Bispecific Antibody Molecules

[0603] Cloning of Cross-Species Specific Binding Molecules

[0604] Generally, bispecific antibody molecules, each comprising a domain with a binding specificity cross-species specific for human and non-chimpanzee primate CD3 epsilon as well as a domain with a binding specificity cross-species specific for human and non-chimpanzee primate CD33, were designed as set out in the following Table 6:

TABLE 6
Formats of anti-CD3 and anti-CD33 cross-species specific bispecific
molecules

| SEQ ID | Formats of protein constructs |
|---|---|
| (nucl/prot) | (N → C) |
| 448/447 | AH11HL × H2CHL |
| 394/393 | AH3HL × H2CHL |
| 430/429 | AC8HL × H2CHL |
| 412/411 | AF5HL × H2CHL |
| 484/483 | F2HL × H2CHL |
| 520/519 | E11HL × H2CHL |
| 466/465 | B3HL × H2CHL |
| 502/501 | B10HL × H2CHL |
| 450/449 | AH11HL × F12QHL |
| 396/395 | AH3HL × F12QHL |
| 432/431 | AC8HL × F12QHL |
| 414/413 | AF5HL × F12QHL |
| 486/485 | F2HL × F12QHL |
| 522/521 | E11HL × F12QHL |
| 468/467 | B3HL × F12QHL |
| 504/503 | B10HL × F12QHL |
| 452/451 | AH11HL × I2CHL |
| 398/397 | AH3HL × I2CHL |
| 434/433 | AC8HL × I2CHL |
| 416/415 | AF5HL × I2CHL |
| 488/487 | F2HL × I2CHL |
| 524/523 | E11HL × I2CHL |
| 470/469 | B3HL × I2CHL |
| 506/505 | B10HL × I2CHL |

[0605] The aforementioned constructs containing the variable light-chain (L) and variable heavy-chain (H) domains cross-species specific for human and macaque CD33 and the CD3 specific VH and VL combinations cross-species specific for human and macaque CD3 were obtained by gene synthesis. The gene synthesis fragments were designed as to contain first a Kozak site for eukaryotic expression of the construct, followed by a 19 amino acid immunoglobulin leader peptide, followed in frame by the coding sequence of the respective bispecific antibody molecule, followed in frame by the coding sequence of a histidine₆-tag and a stop codon. The gene synthesis fragment was also designed as to introduce suitable restriction sites at the beginning and at the end of the fragment. The introduced restriction sites were utilized in the following cloning procedures. The gene synthesis fragment was cloned via these restriction sites into a plasmid designated pEF-DHFR (pEF-DHFR is described in Raum et al. Cancer Immunol Immunother 50 (2001) 141-150) following standard protocols. The aforementioned procedures were carried out according to standard protocols (Sambrook, Molecular Cloning; A Laboratory Manual, 3rd edition, Cold Spring Harbour Laboratory Press, Cold Spring Harbour, N.Y. (2001)). A clone with sequence-verified nucleotide sequence was transfected into DHFR deficient CHO cells for eukaryotic expression of the construct. Eukaryotic protein expression in DHFR deficient CHO cells was performed as described by Kaufmann R. J. (1990) Methods Enzymol. 185, 537-566. Gene amplification of the construct was induced by increasing concentrations of methothrexate (MTX) to a final concentration of up to 20 nM MTX.

[0606] Expression and Purification of the Bispecific Antibody Molecules

[0607] The bispecific antibody molecules are expressed in Chinese hamster ovary cells (CHO). Eukaryotic protein expression in DHFR deficient CHO cells was performed as described by Kaufmann R. J. (1990) Methods Enzymol. 185, 537-566. Gene amplification of the constructs was induced by addition of increasing concentrations of MTX up to final concentrations of 20 nM MTX. After two passages of stationary culture the cells were grown in roller bottles with nucleoside-free HyQ PF CHO liquid soy medium (with 4.0 mM L-Glutamine with 0.1% Pluronic F—68; HyClone) for 7 days before harvest. The cells were removed by centrifugation and the supernatant containing the expressed protein was stored at −20° C. Alternatively, constructs were transiently expressed in HEK 293 cells. Transfection was performed with 293fectin reagent (Invitrogen, #12347-019) according to the manufacturer's protocol.

[0608] Äkta® Explorer System (GE Health Systems) and Unicorn® Software were used for chromatography. Immobilized metal affinity chromatography (“IMAC”) was performed using a Fractogel EMD chelate® (Merck) which was loaded with ZnCl₂ according to the protocol provided by the manufacturer. The column was equilibrated with buffer A (20 mM sodium phosphate buffer pH 7.2, 0.1 M NaCl) and the cell culture supernatant (500 ml) was applied to the column (10 ml) at a flow rate of 3 ml/min. The column was washed with buffer A to remove unbound sample. Bound protein was eluted using a two step gradient of buffer B (20 mM sodium phosphate buffer pH 7.2, 0.1 M NaCl, 0.5 M Imidazole) according to the following:

[0609] Step 1: 20% buffer B in 6 column volumes

[0610] Step 2: 100% buffer B in 6 column volumes

[0611] Eluted protein fractions from step 2 were pooled for further purification. All chemicals were of research grade and purchased from Sigma (Deisenhofen) or Merck (Darmstadt).

[0612] Gel filtration chromatography was performed on a HiLoad 16/60 Superdex 200 prep grade column (GE/Amersham) equilibrated with Equi-buffer (25 mM Citrate, 200 mM Lysine, 5% Glycerol, pH 7.2). Eluted protein samples (flow rate 1 ml/min) were subjected to standard SDS-PAGE and Western Blot for detection. Prior to purification, the column was calibrated for molecular weight determination (molecular weight marker kit, Sigma MW GF-200). Protein concentrations were determined using OD280 nm.

[0613] Purified bispecific antibody protein was analyzed in SDS PAGE under reducing conditions performed with pre-cast 4-12% Bis Tris gels (Invitrogen). Sample preparation and application were performed according to the protocol provided by the manufacturer. The molecular weight was determined with MultiMark protein standard (Invitrogen). The gel was stained with colloidal Coomassie (Invitrogen protocol). The purity of the isolated protein is >95% as determined by SDS-PAGE.

[0614] The bispecific antibody has a molecular weight of about 52 kDa under native conditions as determined by gel filtration in PBS. All constructs were purified according to this method.

[0615] Western Blot was performed using an Optitran® BA-S83 membrane and the Invitrogen Blot Module according to the protocol provided by the manufacturer. For detection of the bispecific antibody protein antibodies an anti-His Tag antibody was used (Penta His, Qiagen). A Goat-anti-mouse Ig antibody labeled with alkaline phosphatase (AP) (Sigma) was used as secondary antibody and BCIP/NBT (Sigma) as substrate. A single band was detected at 52 kD corresponding to the purified bispecific antibody.

[0616] 23.4. Flow Cytometric Binding Analysis of the CD33 and CD3 Cross-Species Specific Bispecific Antibodies

[0617] In order to test the functionality of the cross-species specific bispecific antibody constructs regarding the capability to bind to human and macaque CD33 and CD3, respectively, a FACS analysis was performed. For this purpose CHO cells transfected with human CD33 as described in Example 23.1 and the human CD3 positive T cell leukemia cell line HPB-ALL (DSMZ, Braunschweig, ACC483) were used to test the binding to human antigens. The binding reactivity to macaque antigens was tested by using the generated macaque CD33 transfectant described in Example 23.2 and macaque PBMC (preparation of macaque PBMC was performed by Ficoll gradient centrifugation of peripheral blood from macaque monkeys according to standard protocolls). 200,000 cells of the respective cell lines of PBMC were incubated for 30 min. on ice with 50 μl of the purified protein of the cross-species specific bispecific antibody constructs (5 μg/ml) or cell culture supernatant of transfected cells expressing the cross-species specific bispecific antibody constructs. The cells were washed twice in PBS with 2% FCS and binding of the construct was detected with a murine anti-His antibody (Penta His antibody; Qiagen; diluted 1:20 in 50 μl PBS with 2% FCS). After washing, bound anti-His antibodies were detected with an Fc gamma-specific antibody (Dianova) conjugated to phycoerythrin, diluted 1:100 in PBS with 2% FCS. Supernatant of untransfected CHO cells was used as negative control.

[0618] Flow cytometry was performed on a FACS-Calibur apparatus; the CellQuest software was used to acquire and analyze the data (Becton Dickinson biosciences, Heidelberg). FACS staining and measuring of the fluorescence intensity were performed as described in Current Protocols in Immunology (Coligan, Kruisbeek, Margulies, Shevach and Strober, Wiley-Interscience, 2002).

[0619] The specific binding of human and non-chimpanzee primate CD3 of the CD3 binding molecules of the invention was clearly detectable as shown in FIG. 33. In the FACS analysis all constructs show binding to CD3 and CD33 as compared to the respective negative controls. Cross-species specificity of the bispecific antibodies to human and macaque CD3 and CD33 antigens is demonstrated.

[0620] 23.5. Bioactivity of CD33 and CD3 Cross-Species Specific Bispecific Antibodies

[0621] Bioactivity of the generated bispecific antibodies was analyzed by chromium 51 (⁵¹Cr) release in vitro cytotoxicity assays using the CD33 positive cell lines described in Examples 23.1 and 23.2. As effector cells stimulated human CD4/CD56 depleted PBMC or the macaque T cell line 4119LnPx were used as specified in the respective figures.

[0622] Generation of stimulated human PBMC was performed as follows:

[0623] A Petri dish (85 mm diameter, Nunc) was coated with a commercially available anti-CD3 specific antibody (e.g. OKT3, Othoclone) in a final concentration of 1 μg/ml for 1 hour at 37° C. Unbound protein was removed by one washing step with PBS. The fresh PBMC were isolated from peripheral blood (30-50 ml human blood) by Ficoll gradient centrifugation according to standard protocols. 3-5×10⁷ PBMC were added to the precoated petri dish in 50 ml of RPMI 1640 with stabilized glutamine/10% FCS/IL-2 20 U/ml (Proleukin, Chiron) and stimulated for 2 days. On the third day the cells were collected and washed once with RPMI 1640. IL-2 was added to a final concentration of 20 U/ml and the cells were cultivated again for one day in the same cell culture medium as above.

[0624] Target cells were washed twice with PBS and labeled with 11.1 MBq ⁵¹Cr in a final volume of 100 μl RPMI with 50% FCS for 45 minutes at 37° C. Subsequently the labeled target cells were washed 3 times with 5 ml RPMI and then used in the cytotoxicity assay. The assay was performed in a 96 well plate in a total volume of 250 μl supplemented RPMI (as above) with an E:T ratio of 10:1. 1 μg/ml of the cross-species specific bispecific antibody molecules and 20 threefold dilutions thereof were applied. The assay time was 18 hours and cytotoxicity was measured as relative values of released chromium in the supernatant related to the difference of maximum lysis (addition of Triton-X) and spontaneous lysis (without effector cells). All measurements were done in quadruplicates. Measurement of chromium activity in the supernatants was performed with a Wizard 3″ gamma counter (Perkin Elmer Life Sciences GmbH, Köln, Germany). Analysis of the experimental data was performed with Prism 4 for Windows (version 4.02, GraphPad Software Inc., San Diego, Calif., USA). Sigmoidal dose response curves typically have R² values >0.90 as determined by the software. EC₅₀ values calculated by the analysis program were used for comparison of bioactivity.

[0625] As shown in FIG. 34, all of the generated cross-species specific bispecific constructs demonstrate cytotoxic activity against human CD33 positive target cells elicited by stimulated human CD4/CD56 depleted PBMC and against macaque CD33 positive target cells elicited by the macaque T cell line 4119LnPx.

[0626] 24. Generation and Characterization of CAIX and CD3 Cross-Species Specific Bispecific Single Chain Molecules

[0627] 24.1 Generation of CHO Cells Expressing Human CAIX

[0628] The coding sequence of human CAIX as published in GenBank (Accession number NM_{—}001216) was obtained by gene synthesis according to standard protocols. The gene synthesis fragment was designed as to contain the coding sequence of the human CAIX protein including its leader peptide (the cDNA and amino acid sequence of the construct is listed under SEQ ID Nos 604 and 605). The gene synthesis fragment was also designed as to introduce restriction sites at the beginning and at the end of the fragment. The introduced restriction sites, XbaI at the 5′ end and SalI at the 3′ end, were utilized in the following cloning procedures. The gene synthesis fragment was cloned via XbaI and SalI into a plasmid designated pEF-DHFR (pEF-DHFR is described in Raum et al. Cancer Immunol Immunother 50 (2001) 141-150) following standard protocols. The aforementioned procedures were carried out according to standard protocols (Sambrook, Molecular Cloning; A Laboratory Manual, 3rd edition, Cold Spring Harbour Laboratory Press, Cold Spring Harbour, N.Y. (2001)). A clone with sequence-verified nucleotide sequence was transfected into DHFR deficient CHO cells for eukaryotic expression of the construct. Eukaryotic protein expression in DHFR deficient CHO cells was performed as described by Kaufmann R. J. (1990) Methods Enzymol. 185, 537-566. Gene amplification of the construct was induced by increasing concentrations of methotrexate (MTX) to a final concentration of up to 20 nM MTX.

[0629] 24.2 Generation of CHO Cells Expressing Macaque CAIX

[0630] The coding sequence of macaque CAIX as published in GenBank (Accession number XM_{—}001088481) was obtained by gene synthesis according to standard protocols. The gene synthesis fragment was designed as to contain the coding sequence of the macaque CAIX protein including its leader peptide (the cDNA and amino acid sequence of the construct is listed under SEQ ID Nos 606 and 607). The gene synthesis fragment was also designed as to introduce restriction sites at the beginning and at the end of the fragment. The introduced restriction sites, XbaI at the 5′ end and SalI at the 3′ end, were utilized in the following cloning procedures. The gene synthesis fragment was cloned via XbaI and SalI into a plasmid designated pEF-DHFR (pEF-DHFR is described in Raum et al. Cancer Immunol Immunother 50 (2001) 141-150) following standard protocols. The afore-mentioned procedures were carried out according to standard protocols (Sambrook, Molecular Cloning; A Laboratory Manual, 3rd edition, Cold Spring Harbour Laboratory Press, Cold Spring Harbour, N.Y. (2001)). A clone with sequence-verified nucleotide sequence was transfected into DHFR deficient CHO cells for eukaryotic expression of the construct. Eukaryotic protein expression in DHFR deficient CHO cells was performed as described by Kaufmann R. J. (1990) Methods Enzymol. 185, 537-566. Gene amplification of the construct was induced by increasing concentrations of methotrexate (MTX) to a final concentration of up to 20 nM MTX.

[0631] 24.3 Generation of CAIX and CD3 Cross-Species Specific Bispecific Single Chain Molecules

[0632] Cloning of Cross-Species Specific Binding Molecules

[0633] Generally, bispecific single chain antibody molecules, each comprising a domain with a binding specificity cross-species specific for human and non-chimpanzee primate CD3epsilon as well as a domain with a binding specificity cross-species specific for human and non-chimpanzee primate CAIX, were designed as set out in the following Table 7:

TABLE 7
Formats of anti-CD3 and anti-CAIX cross-species specific
bispecific single chain antibody molecules

| SEQ ID | Formats of protein constructs |
|---|---|
| (nucl/prot) | (N → C) |
| 539/538 | CA9-A8 HL × H2C HL |
| 571/570 | CA9-B2 HL × H2C HL |
| 557/556 | CA9-E8 HL × I2C HL |
| 543/542 | CA9-A8 HL × I2C HL |
| 575/574 | CA9-B2 HL × I2C HL |
| 541/540 | CA9-A8 HL × F12Q HL |
| 573/572 | CA9-B2 HL × F12Q HL |

[0634] The aforementioned constructs containing the variable light-chain (L) and variable heavy-chain (H) domains cross-species specific for human and macaque CAIX and the CD3 specific VH and VL combinations cross-species specific for human and macaque CD3 were obtained by gene synthesis. The gene synthesis fragments were designed as to contain first a Kozak site for eukaryotic expression of the construct, followed by a 19 amino acid immunoglobulin leader peptide, followed in frame by the coding sequence of the respective bispecific single chain antibody molecule, followed in frame by the coding sequence of a 6 histidine tag and a stop codon. The gene synthesis fragment was also designed as to introduce suitable restriction sites at the beginning and at the end of the fragment. The introduced restriction sites were utilized in the following cloning procedures. The gene synthesis fragment was cloned via these restriction sites into a plasmid designated pEF-DHFR (pEF-DHFR is described in Raum et al. Cancer Immunol Immunother 50 (2001) 141-150) following standard protocols. The aforementioned procedures were carried out according to standard protocols (Sambrook, Molecular Cloning; A Laboratory Manual, 3rd edition, Cold Spring Harbour Laboratory Press, Cold Spring Harbour, N.Y. (2001)). A clone with sequence-verified nucleotide sequence was transfected into DHFR deficient CHO cells for eukaryotic expression of the construct. Eukaryotic protein expression in DHFR deficient CHO cells was performed as described by Kaufmann R. J. (1990) Methods Enzymol. 185, 537-566. Gene amplification of the construct was induced by increasing concentrations of methothrexate (MTX) to a final concentration of up to 20 nM MTX.

[0635] 24.4. Expression and Purification of the Bispecific Single Chain Antibody Molecules

[0636] The bispecific single chain antibody molecules were expressed in Chinese hamster ovary cells (CHO). Eukaryotic protein expression in DHFR deficient CHO cells was performed as described by Kaufmann R. J. (1990) Methods Enzymol. 185, 537-566. Gene amplification of the constructs was induced by addition of increasing concentrations of MTX up to final concentrations of 20 nM MTX. After two passages of stationary culture the cells were grown in roller bottles with nucleoside-free HyQ PF CHO liquid soy medium (with 4.0 mM L-Glutamine with 0.1% Pluronic F—68; HyClone) for 7 days before harvest. The cells were removed by centrifugation and the supernatant containing the expressed protein was stored at −20° C. Alternatively, constructs were transiently expressed in HEK 293 cells. Transfection was performed with 293fectin reagent (Invitrogen, #12347-019) according to the manufacturer's protocol.

[0637] Äkta® Explorer System (GE Health Systems) and Unicorn® Software were used for chromatography. Immobilized metal affinity chromatography (“IMAC”) was performed using a Fractogel EMD chelate® (Merck) which was loaded with ZnCl₂ according to the protocol provided by the manufacturer. The column was equilibrated with buffer A (20 mM sodium phosphate buffer pH 7.2, 0.1 M NaCl) and the cell culture supernatant (500 ml) was applied to the column (10 ml) at a flow rate of 3 ml/min. The column was washed with buffer A to remove unbound sample. Bound protein was eluted using a two step gradient of buffer B (20 mM sodium phosphate buffer pH 7.2, 0.1 M NaCl, 0.5 M Imidazole) according to the following:

[0638] Step 1: 20% buffer B in 6 column volumes

[0639] Step 2: 100% buffer B in 6 column volumes

[0640] Eluted protein fractions from step 2 were pooled for further purification. All chemicals are of research grade and purchased from Sigma (Deisenhofen) or Merck (Darmstadt).

[0641] Gel filtration chromatography was performed on a HiLoad 16/60 Superdex 200 prep grade column (GE/Amersham) equilibrated with Equi-buffer (25 mM Citrate, 200 mM Lysine, 5% Glycerol, pH 7.2). Eluted protein samples (flow rate 1 ml/min) were subjected to standard SDS-PAGE and Western Blot for detection. Prior to purification, the column was calibrated for molecular weight determination (molecular weight marker kit, Sigma MW GF-200). Protein concentrations were determined using OD280 nm.

[0642] Purified bispecific single chain antibody protein was analyzed in SDS PAGE under reducing conditions performed with pre-cast 4-12% Bis Tris gels (Invitrogen). Sample preparation and application were performed according to the protocol provided by the manufacturer. The molecular weight was determined with MultiMark protein standard (Invitrogen). The gel was stained with colloidal Coomassie (Invitrogen protocol). The purity of the isolated protein is >95% as determined by SDS-PAGE.

[0643] The bispecific single chain antibody has a molecular weight of about 52 kDa under native conditions as determined by gel filtration in PBS. All constructs were purified according to this method.

[0644] Western Blot was performed using an Optitran® BA-S83 membrane and the Invitrogen Blot Module according to the protocol provided by the manufacturer. For detection of the bispecific single chain antibody protein antibodies an anti-His Tag antibody was used (Penta His, Qiagen). A Goat-anti-mouse Ig antibody labeled with alkaline phosphatase (AP) (Sigma) was used as secondary antibody and BCIP/NBT (Sigma) as substrate. A single band was detected at 52 kD corresponding to the purified bispecific single chain antibody.

[0645] 24.5 Flow Cytometric Binding Analysis of the CAIX and CD3 Cross-Species Specific Bispecific Antibodies

[0646] In order to test the functionality of the cross-species specific bispecific antibody constructs regarding the capability to bind to human and macaque CAIX and CD3, respectively, a FACS analysis was performed. For this purpose CHO cells transfected with human CAIX as described in Example 24.1 and the human CD3 positive T cell leukemia cell line HPB-ALL (DSMZ, Braunschweig, ACC483) were used to test the binding to human antigens. The binding reactivity to macaque antigens was tested by using the generated macaque CAIX transfectant described in Example 24.2 and a macaque T cell line 4119LnPx (kindly provided by Prof. Fickenscher, Hygiene Institute, Virology, Erlangen-Nuernberg; published in Knappe A, et al., and Fickenscher H., Blood 2000, 95, 3256-61). 200,000 cells of the respective cell lines were incubated for 30 min on ice with 50 μl of the purified protein of the cross-species specific bispecific antibody constructs (2 μg/ml) or cell culture supernatant of transfected cells expressing the cross-species specific bispecific antibody constructs. The cells were washed twice in PBS with 2% FCS and binding of the construct was detected with a murine anti-His antibody (Penta His antibody; Qiagen; diluted 1:20 in 50 μl PBS with 2% FCS). After washing, bound anti-His antibodies were detected with an Fc gamma-specific antibody (Dianova) conjugated to phycoerythrin, diluted 1:100 in PBS with 2% FCS. Supernatant of untransfected CHO cells was used as negative control for binding to the T cell lines. A single chain construct with irrelevant target specificity was used as negative control for binding to the CAIX transfected CHO cells.

[0647] Flow cytometry was performed on a FACS-Calibur apparatus; the CellQuest software was used to acquire and analyze the data (Becton Dickinson biosciences, Heidelberg). FACS staining and measuring of the fluorescence intensity were performed as described in Current Protocols in Immunology (Coligan, Kruisbeek, Margulies, Shevach and Strober, Wiley-Interscience, 2002).

[0648] The bispecific binding of the single chain molecules listed above, which are cross-species specific for CAIX and cross-species specific for human and non-chimpanzee primate CD3 was clearly detectable as shown in FIG. 35. In the FACS analysis all constructs showed binding to CD3 and CAIX as compared to the respective negative controls. Cross-species specificity of the bispecific antibodies to human and non-chimpanzee primate CD3 and CAIX antigens was demonstrated.

[0649] 24.6 Bioactivity of CAIX and CD3 Cross-Species Specific Bispecific Single Chain Antibodies

[0650] Bioactivity of the generated bispecific single chain antibodies was analyzed by chromium 51 (⁵¹Cr) release in vitro cytotoxicity assays using the CAIX positive cell lines described in Examples 24.1 and 24.2. As effector cells stimulated human CD4/CD56 depleted PBMC, stimulated human PBMC or the macaque T cell line 4119LnPx were used as specified in the respective figures.

[0651] Generation of stimulated human PBMC was performed as follows:

[0652] A Petri dish (145 mm diameter, Greiner) was coated with a commercially available anti-CD3 specific antibody (e.g. OKT3, Othoclone) in a final concentration of 1 μg/ml for 1 hour at 37° C. Unbound protein was removed by one washing step with PBS. The fresh PBMC were isolated from peripheral blood (30-50 ml human blood) by Ficoll gradient centrifugation according to standard protocols. 3-5×10⁷ PBMC were added to the precoated petri dish in 120 ml of RPMI 1640 with stabilized glutamine/10% FCS/IL-2 20 U/ml (Proleukin, Chiron) and stimulated for 2 days. On the third day the cells were collected and washed once with RPMI 1640. IL-2 was added to a final concentration of 20 U/ml and the cells were cultivated again for one day in the same cell culture medium as above.

[0653] Generation of the stimulated CD4/CD56 depleted PBMC was performed as follows: A Petri dish (145 mm diameter, Greiner) was coated with a commercially available anti-CD3 specific antibody (e.g. OKT3, Othoclone) in a final concentration of 1 μg/ml for 1 hour at 37° C. Unbound protein was removed by one washing step with PBS. The fresh PBMC were isolated from peripheral blood (30-50 ml human blood) by Ficoll gradient centrifugation according to standard protocols. 3-5×10⁷ PBMC were added to the precoated petri dish in 120 ml of RPMI 1640 with stabilized glutamine/10% FCS/IL-2 20 U/ml (Proleukin, Chiron) and stimulated for 2 days. On the third day the cells were collected and washed once with RPMI 1640. IL-2 was added to a final concentration of 20 U/ml and the cells were cultivated again for one day in the same cell culture medium as above. By depletion of CD4+ T cells and CD56+ NK cells according to standard protocols CD8+ cytotoxic T lymphocytes (CTLs) were enriched.

[0654] Target cells were washed twice with PBS and labeled with 11.1 MBq ⁵¹Cr in a final volume of 100 μl RPMI with 50% FCS for 45 minutes at 37° C. Subsequently the labeled target cells were washed 3 times with 5 ml RPMI and then used in the cytotoxicity assay. The assay was performed in a 96 well plate in a total volume of 250 μl supplemented RPMI (as above) with differing E:T ratios from 5:1 to 50:1 which are specified in the respective figures. 1 μg/ml of the cross-species specific bispecific single chain antibody molecules and 20 threefold dilutions thereof were applied. The assay time was 16 hours and cytotoxicity was measured as relative values of released chromium in the supernatant related to the difference of maximum lysis (addition of Triton-X) and spontaneous lysis (without effector cells). All measurements were done in quadruplicates. Measurement of chromium activity in the supernatants was performed with a Wizard 3″ gamma counter (Perkin Elmer Life Sciences GmbH, Köln, Germany). Analysis of the experimental data was performed with Prism 4 for Windows (version 4.02, GraphPad Software Inc., San Diego, Calif., USA). Sigmoidal dose response curves typically have R² values >0.90 as determined by the software. EC₅₀ values calculated by the analysis program were used for comparison of bioactivity.

[0655] As shown in FIG. 36, all of the generated cross-species specific bispecific single chain antibody constructs demonstrated cytotoxic activity against human CAIX positive target cells elicited by stimulated human CD4/CD56 depleted PBMC or stimulated PBMC and against macaque CAIX positive target cells elicited by the macaque T cell line 4119LnPx.

[0656] 25. Generation and Characterization of EpCAM and CD3 Cross-Species Specific Bispecific Single Chain Molecules

[0657] Construction of EpCAM-Specific Bispecific Antibodies

[0658] The basis for the construction of EpCAM-specific bispecific antibodies was the fully human, EpCAM specific antibody HD69 (Raum et al. Cancer Immunol Immunother (2001) 50: 141 ff). The VH and the VL were PCR amplified from HD69 DNA according to standard methods. VH and VL were cloned subsequently into a plasmid, thus forming a functional scFv (orientation VH-Linker-VL) according to standard protocols. This scFv construct was then PCR amplified using primers introducing a N-terminal BsrGI and a C-terminal BspE1 restriction site useful for functional cloning into the bispecific antibody format (5′-HD69-BsrG1: 5′-gacaggtgtacactccgaggtgcagctgctcgagtctgg-3′; 3′-HD69-BspE1: 5′-tgatagtccggatttgatctccagcttggtcc-3′). The PCR product was then cloned into three suitable expression vectors, each comprising one CD3 specific VH and VL combination cross-species specific for human and macaque CD3 (H2C HL, F12Q HL and I2C, respectively), thus coding for three functional bispecific constructs HD69 HL×H2C HL, HD69 HL×F12Q HL and HD69 HL×I2C HL. The constructs were then transfected into DHFR-deficient CHO-cells by electroporation for stable transfection according to standard procedures, resulting in three transfected cell pools, each pool expressing one of the three bispecific products.

TABLE 8
Formats of anti-EpCAM bispecific single chain antibody molecules
comprising a human-cynomolgus cross-specific anti-CD3 portion

| SEQ ID | Formats of protein constructs |
|---|---|
| (nucl/prot) | (N → C) |
| 589/588 | HD69 HL × H2C HL |
| 591/590 | HD69 HL × F12Q HL |
| 593/592 | HD69 HL × I2C HL |

[0659] Bioactivity of the generated bispecific single chain antibodies (in culture supernatants of CHO cells expressing the respective bispecific constructs) was analyzed by chromium 51 release in vitro cytotoxicity assays using the transfected EpCAM-positive cell line CHO-EpCAM (expressing surface bound human EpCAM, published in Raum et al. Cancer Immunol Immunother (2001) 50: 141 ff) as target cells. As effector cells stimulated human CD8 positive T cells were used. As shown in FIG. 37, all of the generated bispecific single chain antibody constructs revealed cytotoxic activity against human EpCAM-positive target cells elicited by human CD8+ cells. As a negative control, culture supernatant of untransfected CHO cells was used, which revealed no detectable cytotoxicity.

[0660] To demonstrate the cross-specific activity of the generated bispecific constructs on the CD3 arm, flow cytometric analysis were performed in which binding of the constructs to cells expressing human CD3 and cells expressing macaque CD3 was verified. Furthermore, specificity to EpCAM-positive cells was examined.

[0661] In brief, CHO cells transfected with human EpCAM and human CD3 positive T cells in isolated human PBMCs were used to test the binding to human antigens. The binding reactivity to macaque CD3 antigen was tested by using a macaque T cell line 4119LnPx (kindly provided by prof. Fickenscher, Hygiene Institute, Virology, Erlangen-Nuernberg; published in Knappe A, et al., and Fickenscher H., Blood 2000, 95, 3256-61). 200,000 cells of the respective cell lines were incubated for 30 min on ice with cell culture supernatant of transfected cells expressing the CD3 cross-species specific bispecific antibody constructs. The cells were washed twice in PBS with 2% FCS and binding of the construct was detected with a murine anti-His antibody (Penta His antibody; Qiagen; diluted 1:20 in 50 μl PBS with 2% FCS). After washing, bound anti-His antibodies were detected with an Fc gamma-specific antibody (Dianova) conjugated to phycoerythrin, diluted 1:100 in PBS with 2% FCS. Supernatant of untransfected CHO cells was used as negative control for binding to the T cell lines.

[0662] Flow cytometry was performed on a FACS-Calibur apparatus and CellQuest software used to acquire and analyze the data (Becton Dickinson biosciences, Heidelberg). FACS staining and measuring of the fluorescence intensity were performed as described in Current Protocols in Immunology (Coligan, Kruisbeek, Margulies, Shevach and Strober, Wiley-Interscience, 2002).

[0663] The bispecific binding of the single chain molecules, which are specific for human EpCAM and cross-species specific for human and macaque CD3 was clearly detectable as shown in FIG. 38. In the flow cytometric analysis all constructs showed binding to CD3 and EpCAM as compared to the respective negative controls and the EpCAM/CD3 negative CHO cell line.

[0664] 26 Generation and Characterization of EGFRvIII and CD3 Cross-Species Specific Bispecific Single Chain Molecules

[0665] 26.1 Generation and Expression of CHO Cells Transfected with Human EGFRvIII

[0666] The coding sequence of the C-terminal, transmembrane and cytoplasmic domain of the mutant epidermal growth factor receptor (DeltaEGFR, de2-7 EGFR, or EGFRvIII are used as synonyms) containing a deletion of 267 amino acids of the extracellular domain (Kuan C T, Wikstrand C J, Bigner D D: EGF mutant receptor vIII as a molecular target in cancer therapy; Endocr Relat Cancer. 2001 June; 8(2):83-96) was obtained by gene synthesis according to standard protocols. The gene synthesis fragment was designed as to contain first a Kozak site to allow for eukaryotic expression of the construct followed by the coding sequence of an 24 amino acid leader peptide followed in frame by the coding sequence of the human C-terminal extracellular domain, the transmembrane and cytoplasmic domain and a stop codon. The gene synthesis fragment was also designed as to introduce restriction sites at the beginning and at the end of the DNA fragment. For cloning purposes a XbaI and SalI restriction enzyme recognition sites were added at the 5′ and 3′ end, respectively. The synthetic gene DNA was subsequently digested with XbaI and SalI, ligated into the appropriately digested expression vector pEF-DHFR, and transformed into E. coli. A clone with verified nucleotide sequence (cDNA sequence and amino acid sequence of the recombinant construct is listed under SEQ ID NOs 599 and 598) was transfected into DHFR deficient CHO cells for eukaryotic expression of the construct. Eukaryotic protein expression in DHFR deficient CHO cells was performed as described above.

[0667] 26.2 Generation and expression of the of Cynomolgus EGFR VIII

[0668] In analogy to example 26.1 the cynomolgus EGFR vIII variant was created by deletion of the 267 amino acids of the extracellular domain and insertion of the new amino acid glycine at the fusion site (amino acid no. 6). The gene synthesis fragment was designed as to contain first a Kozak site to allow for eukaryotic expression of the construct followed by the coding sequence of an 24 amino acid leader peptide followed in frame by the coding sequence of the cynomolgus C-terminal extracellular domain, the transmembrane and cytoplasmic domain (both human) and a stop codon. The gene synthesis fragment was also designed as to introduce restriction sites at the beginning and at the end of the DNA fragment. The introduced restriction sites XbaI at the 5′ end and SalI at the 3′ end, were utilized in the following cloning procedures. The fragment was digested with XbaI/SalI and cloned into pEF-DHFR following standard protocols. A sequence verified plasmid was used to transfect CHO/dhfr− cells (ATCC No. CRL 9096; cultivated in RPMI 1640 with stabilized glutamine obtained from Biochrom AG Berlin, Germany, supplemented with 10% FCS, 1% penicillin/streptomycin all obtained from Biochrom AG Berlin, Germany and nucleosides from a stock solution of cell culture grade reagents obtained from Sigma-Aldrich Chemie GmbH, Taufkirchen, Germany, to a final concentration of 10 μg/ml Adenosine, 10 μg/ml Deoxyadenosine and 10 μg/ml Thymidine, in an incubator at 37° C., 95% humidity and 7% CO2). Transfection was performed using the PolyFect Transfection Reagent (Qiagen GmbH, Hilden, Germany) and 5 μg of plasmid DNA according to the manufacturer's protocol. After a cultivation of 24 hours, cells were washed once with PBS and again cultivated in the aforementioned cell culture medium except that the medium was not supplemented with nucleosides and dialyzed FCS (obtained from Biochrom AG Berlin, Germany) was used. Thus the cell culture medium did not contain nucleosides and thereby selection was applied on the transfected cells. Approximately 14 days after transfection the outgrowth of resistant cells was observed. After an additional 7 to 14 days the transfectants were tested positive for expression of the construct via FACS.

[0669] 26.3 Generation of EGFRvIII and CD3 Cross-Species Specific Bispecific Single Chain Molecules

[0670] Generally, bispecific single chain antibody molecules, each comprising a domain with a binding specificity for the human and the non-chimpanzee primate CD3 antigen as well as a domain with a binding specificity for the human and the non-chimpanzee primate EGFRvIII antigen, were designed as set out in the following Table 9:

TABLE 9
Formats of anti-CD3 and anti-EGFRvIII cross-species
specific bispecific single chain antibody molecules

| SEQ ID | Formats of protein constructs |
|---|---|
| (nucl/prot) | (N → C) |
| 708/707 | V90F5 HL × I2C HL |
| 680/679 | V96A9 HL × I2C HL |
| 694/693 | V98B11 HL × I2C HL |
| 722/721 | V11A11 HL × I2C HL |
| 736/735 | V11F6 HL × I2C HL |
| 750/749 | V11G7 HL × I2C HL |
| 764/763 | V17F5 HL × I2C HL |
| 778/777 | V11A4 HL × I2C HL |
| 792/791 | V17C8 HL × I2C HL |
| 806/805 | V17G9 HL × I2C HL |
| 820/819 | V17B11 HL × I2C HL |
| 834/833 | V17F11 HL × I2C HL |
| 848/847 | V16B7 HL × I2C HL |
| 862/861 | V17A4 HL × I2C HL |
| 648/647 | V207C12 HL × I2C HL |

[0671] The aforementioned constructs containing the variable light-chain (L) and variable heavy-chain (H) domains cross-species specific for human and cynomolgus EGFR vIII and the CD3 specific VH and VL combinations cross-species specific for human and macaque CD3 were obtained by gene synthesis. The gene synthesis fragments were designed as to contain first a Kozak site for eukaryotic expression of the construct, followed by a 19 amino acid immunoglobulin leader peptide, followed in frame by the coding sequence of the respective bispecific single chain antibody molecule, followed in frame by the coding sequence of a 6 histidine tag and a stop codon. The gene synthesis fragment was also designed as to introduce suitable restriction sites at the beginning and at the end of the fragment. The introduced restriction sites were utilized in the following cloning procedures. The gene synthesis fragment was cloned via these restriction sites into a plasmid designated pEF-DHFR following standard protocols. A clone with sequence-verified nucleotide sequence was transfected into DHFR deficient CHO cells for eukaryotic expression of the construct. Eukaryotic protein expression in DHFR deficient CHO cells was performed as described by Kaufmann R. J. (1990) Methods Enzymol. 185, 537-566. Gene amplification of the construct was induced by increasing concentrations of methothrexate (MTX) to a final concentration of up to 20 nM MTX. Alternatively the constructs were transfected into DHFR-deficient CHO-cells in a transient manner according to standard protocols.

[0672] The FACS binding experiments were performed with the human EGFRvIII transfected CHO cell line to assess the binding capability to the human EGFRvIII antigen. The cross-species specificity to cynomolgus tissue was tested by deploying the CHO cells transfected with the cynomolgus EGFRvIII. The same changes in cell lines apply to the cytotoxicity assays performed with the EGFRvIII and CD3 cross-species specific bispecific single chain antibodies. Apart from this the assays were performed as described in examples 4 and 5.

[0673] As depicted in FIG. 39, the generated EGFRvIII and CD3 cross-species specific bispecific single chain antibodies demonstrated binding to both the human and cynomolgus antigens and proved to be fully cross-species specific.

[0674] As shown in FIG. 40, all of the generated cross-species specific bispecific single chain antibody constructs revealed cytotoxic activity against human EGFRvIII positive target cells elicited by human CD8+ cells and cynomolgus EGFRvIII positive target cells elicited by the macaque T cell line 4119LnPx. As a negative control, an irrelevant bispecific single chain antibody has been used.

[0675] 27. Generation and Characterization of IgE and CD3 Cross-Species Specific Bispecific Single Chain Molecules

[0676] 27.1 Cloning and Expression of the Human and Macaque Membrane Bound Form of IgE

[0677] The mouse cell line J558L (obtained from Interlab Project, Istituto Nazionale per la Ricerca sul Cancro, Genova, Italy, ECACC 88032902), a spontaneous heavy chain-loss-variant myeloma cell line that synthesizes and secretes a lambda light chain, was used to be complemented by a membrane bound heavy chain variant of the human and macaque IgE, respectively. In order to generate such constructs synthetic molecules were obtained by gene synthesis according to standard protocols (the nucleotide sequences of the constructs are listed under SEQ ID Nos 595 and 594). In these constructs the coding sequence for human and macaque CD3 epsilon chain was fused to the human transmembrane region of IgE, respectively. The built in specificity of the VH chain is directed against the hapten (4-hydroxy-3-nitro-phenyl)acetyl) (NP). The gene synthesis fragment was also designed as to contain a Kozak site for eukaryotic expression of the construct and a immunoglobulin leader and restriction sites at the beginning and the end of the DNA. The introduced restriction sites EcoRI at the 5′ end and SalI at the 3′ end were utilized during the cloning step into the expression plasmid designated pEF-DHFR. After sequence verification (macaque: XM_{—}001116734 macaca mulatta Ig epsilon C region, mRNA; human: NC_{—}000014 Homo sapiens chromosome 14, complete sequence, National Center for Biotechnology Information, http://www.ncbi.nlm.nih.gov/entrez) the plasmids were used to transfect CHO/dhfr− cells as described above. Eukaryotic protein expression in DHFR deficient CHO cells is performed as described by Kaufmann R. J. (1990) Methods Enzymol. 185, 537-566. Gene amplification of the construct is induced by increasing concentrations of methothrexate (MTX) to a final concentration of up to 20 nM MTX.

[0678] 27.2 Generation of IgE and CD3 Cross-Species Specific Bispecific Single Chain Molecules

[0679] Generally, bispecific single chain antibody molecules, each comprising a domain with a binding specificity for the human and the non-chimpanzee primate CD3 antigen as well as a domain with a binding specificity for the human and non-chimpanzee primate IgE antigen, were designed as set out in the following Table 10:

TABLE 10
Formats of anti-CD3 and anti-IgE cross-species specific
bispecific single chain antibody molecules

| SEQ ID | Formats of protein constructs |
|---|---|
| (nucl/prot) | (N → C) |
| 1549/1548 | IgE G9 HL × I2C HL |
| 1547/1546 | IgE G9 HL × F12Q HL |
| 1545/1544 | IgE G9 HL × H2C HL |
| 1555/1554 | IgE G9 LH × I2C HL |
| 1553/1552 | IgE G9 LH × F12Q HL |
| 1551/1550 | IgE G9 LH × H2C HL |
| 1529/1528 | IgE D4 LH × I2C HL |
| 1527/1526 | IgE D4 LH × F12Q HL |
| 1525/1524 | IgE D4 LH × H2C HL |
| 1523/1522 | IgE D4 HL × I2C HL |
| 1521/1520 | IgE D4 HL × F12Q HL |
| 1519/1518 | IgE D4 HL × H2C HL |
| 1557/1556 | H2C HL × IgE-G9 HL |
| 1559/1558 | F12Q HL × IgE-G9 HL |
| 1567/1566 | IgE G9 LH × I2C LH |
| 1561/1560 | I2C HL × IgE G9 HL |
| 1563/1562 | I2C HL × IgE G9 LH |
| 1565/1564 | I2C LH × IgE G9 LH |

[0680] The aforementioned constructs containing the variable light-chain (L) and variable heavy-chain (H) domains cross-species specific for human and macaque IgE and the CD3 specific VH and VL combinations cross-species specific for human and macaque CD3 were obtained by gene synthesis. The gene synthesis fragments were designed as to contain first a Kozak site for eukaryotic expression of the construct, followed by a 19 amino acid immunoglobulin leader peptide, followed in frame by the coding sequence of the respective bispecific single chain antibody molecule, followed in frame by the coding sequence of a 6 histidine tag and a stop codon. The gene synthesis fragment was also designed as to introduce suitable restriction sites at the beginning and at the end of the fragment. The introduced restriction sites were utilized in the following cloning procedures. The gene synthesis fragment was cloned via these restriction sites into a plasmid designated pEF-DHFR following standard protocols. A clone with sequence-verified nucleotide sequence was transfected into DHFR deficient CHO cells for eukaryotic expression of the construct. Eukaryotic protein expression in DHFR deficient CHO cells was performed as described by Kaufmann R. J. (1990) Methods Enzymol. 185, 537-566. Gene amplification of the construct was induced by increasing concentrations of methothrexate (MTX) to a final concentration of up to 20 nM MTX. Alternatively the constructs were transfected into DHFR-deficient CHO-cells in a transient manner according to standard protocols.

[0681] The FACS binding experiments were performed with the human IgE transfected J558L cell line to assess the binding capability to the human IgE. The cross-species specificity to macaque IgE positive cells was tested by deploying the J558L cells transfected with the macaque IgE. The same changes in cell lines apply to the The J558L cell line was also used for the cytotoxicity assays performed with the IgE and CD3 cross-species specific bispecific single chain antibodies. The binding experiments as well as the cytotoxicity assays were performed as described above.

[0682] As depicted in FIG. 41, the generated IgE and CD3 cross-species specific bispecific single chain antibodies demonstrated binding to both the human and cynomolgus antigens and proved to be fully cross-species specific.

[0683] As shown in FIG. 42, all of the generated cross-species specific bispecific single chain antibody constructs revealed cytotoxic activity against human IgE positive target cells elicited by human CD8+ cells and macaque IgE positive target cells elicited by the macaque T cell line 4119LnPx. As a negative control, an irrelevant bispecific single chain antibody has been used.

[0684] 28. Generation and Characterization of CD44 and CD3 Cross-Species Specific Bispecific Single Chain Molecules

[0685] 28.1 Generation of CHO Cells Expressing Human CD44

[0686] The coding sequence of human CD44 as published in GenBank (Accession number AJ251595) and also containing the CD44v6 exon was obtained by gene synthesis according to standard protocols. The gene synthesis fragment was designed as to contain first a Kozak site for eukaryotic expression of the construct, followed by the coding sequence of the human CD44 protein and a stop codon (the cDNA and amino acid sequence of the construct is listed under SEQ ID Nos 608 and 609). The gene synthesis fragment was also designed as to introduce restriction sites at the beginning and at the end of the fragment. The introduced restriction sites, EcoRI at the 5′ end and SalI at the 3′ end, were utilized in the following cloning procedures. The gene synthesis fragment was cloned via EcoRI and SalI into a plasmid designated pEF-DHFR (pEF-DHFR was described in Raum et al. Cancer Immunol Immunother 50 (2001) 141-150) following standard protocols. The afore-mentioned procedures were carried out according to standard protocols (Sambrook, Molecular Cloning; A Laboratory Manual, 3rd edition, Cold Spring Harbour Laboratory Press, Cold Spring Harbour, New York (2001)). A clone with sequence-verified nucleotide sequence was transfected into DHFR deficient CHO cells for eukaryotic expression of the construct. Eukaryotic protein expression in DHFR deficient CHO cells was performed as described by Kaufmann R. J. (1990) Methods Enzymol. 185, 537-566. Gene amplification of the construct was induced by increasing concentrations of methotrexate (MTX) to a final concentration of up to 20 nM MTX.

[0687] 28.2 Generation of CHO Cells Expressing Human CD44 Without the v6 Exon

[0688] The coding sequence of human CD44 as published in GenBank (Accession number AJ251595) deleted for the sequence coding the v6 exon was obtained by gene synthesis according to standard protocols. The gene synthesis fragment was designed as to contain first a Kozak site for eukaryotic expression of the construct, followed by the coding sequence of the human CD44 protein without the v6 exon and a stop codon (the cDNA and amino acid sequence of the construct is listed under SEQ ID Nos 610 and 611). The gene synthesis fragment was also designed as to introduce restriction sites at the beginning and at the end of the fragment. The introduced restriction sites, EcoRI at the 5′ end and SalI at the 3′ end, were utilized in the following cloning procedures. The gene synthesis fragment was cloned via EcoRI and SalI into a plasmid designated pEF-DHFR (pEF-DHFR is described in Raum et al. Cancer Immunol Immunother 50 (2001) 141-150) following standard protocols. The afore-mentioned procedures were carried out according to standard protocols (Sambrook, Molecular Cloning; A Laboratory Manual, 3rd edition, Cold Spring Harbour Laboratory Press, Cold Spring Harbour, N.Y. (2001)). A clone with sequence-verified nucleotide sequence was transfected into DHFR deficient CHO cells for eukaryotic expression of the construct. Eukaryotic protein expression in DHFR deficient CHO cells was performed as described by Kaufmann R. J. (1990) Methods Enzymol. 185, 537-566. Gene amplification of the construct was induced by increasing concentrations of methotrexate (MTX) to a final concentration of up to 20 nM MTX.

[0689] 28.3 Generation of CHO Cells Expressing Macaque CD44

[0690] The coding sequence of macaque CD44 as published in GenBank (Accession number XM_{—}001115359) and also containing the CD44v6 exon was obtained by gene synthesis according to standard protocols (the cDNA and amino acid sequence of the construct is listed under SEQ ID Nos 612 and 613). In the utilized construct the coding sequence corresponds to macaque CD44 except for a point mutation at position 1 of the codon of the fifth amino acid of the signal peptide of the CD44 protein, which results in a mutation from arginine to tryptophan corresponding to the human sequence. The gene synthesis fragment was also designed as to contain a Kozak site for eukaryotic expression of the construct and restriction sites at the beginning and the end of the fragment. The introduced restriction sites EcoRI at the 5′ end and SalI at the 3′ end, were utilized in the following cloning procedures. The gene synthesis fragment was then cloned via EcoRI and SalI into a plasmid designated pEF-DHFR (pEF-DHFR is described in Raum et al. Cancer Immunol Immunother 50 (2001) 141-150). A sequence verified clone of this plasmid was used to transfect CHO/dhfr− cells as described above.

[0691] 28.4 Generation of CD44v6 and CD3 Cross-Species Specific Bispecific Single Chain Molecules

[0692] Generally, bispecific single chain antibody molecules, each comprising a domain with a binding specificity cross-species specific for human and non-chimpanzee primate CD3epsilon as well as a domain with a binding specificity cross-species specific for human and non-chimpanzee primate CD44v6, are designed as set out in the following Table 11:

TABLE 11
Formats of anti-CD3 and anti-CD44v6 cross-species
specific bispecific single chain antibody molecules

| SEQ ID | Formats of protein constructs |
|---|---|
| (nucl/prot) | (N → C) |
| 1589/1588 | CD44-A8LH × I2C HL |
| 1587/1586 | CD44-A8HL × I2C HL |

[0693] The aforementioned constructs containing the variable light-chain (L) and variable heavy-chain (H) domains cross-species specific for human and macaque CD44 and the CD3 specific VH and VL combinations cross-species specific for human and macaque CD3 are obtained by gene synthesis. The gene synthesis fragments were designed as to contain first a Kozak site for eukaryotic expression of the construct, followed by a 19 amino acid immunoglobulin leader peptide, followed in frame by the coding sequence of the respective bispecific single chain antibody molecule, followed in frame by the coding sequence of a histidine₆-tag and a stop codon. The gene synthesis fragment was also designed as to introduce suitable restriction sites at the beginning and at the end of the fragment. The introduced restriction sites were utilized in the following cloning procedures. The gene synthesis fragment was cloned via these restriction sites into a plasmid designated pEF-DHFR (pEF-DHFR is described in Raum et al. Cancer Immunol Immunother 50 (2001) 141-150) following standard protocols. The aforementioned procedures were carried out according to standard protocols (Sambrook, Molecular Cloning; A Laboratory Manual, 3rd edition, Cold Spring Harbour Laboratory Press, Cold Spring Harbour, N.Y. (2001)). A clone with sequence-verified nucleotide sequence was transfected into DHFR deficient CHO cells for eukaryotic expression of the construct. Eukaryotic protein expression in DHFR deficient CHO cells was performed as described by Kaufmann R. J. (1990) Methods Enzymol. 185, 537-566. Gene amplification of the construct was induced by increasing concentrations of methotrexate (MTX) to a final concentration of up to 20 nM MTX.

[0694] 28.5 Expression and Purification of the Bispecific Single Chain Antibody Molecules

[0695] The bispecific single chain antibody molecules were expressed in Chinese hamster ovary cells (CHO). Eukaryotic protein expression in DHFR deficient CHO cells was performed as described by Kaufmann R. J. (1990) Methods Enzymol. 185, 537-566. Gene amplification of the constructs was induced by addition of increasing concentrations of MTX up to final concentrations of 20 nM MTX. After two passages of stationary culture the cells were grown in roller bottles with nucleoside-free HyQ PF CHO liquid soy medium (with 4.0 mM L-Glutamine with 0.1% Pluronic F-68; HyClone) for 7 days before harvest. The cells were removed by centrifugation and the supernatant containing the expressed protein was stored at −20° C. Alternatively, constructs were transiently expressed in HEK 293 cells. Transfection was performed with 293fectin reagent (Invitrogen, #12347-019) according to the manufacturer's protocol.

[0696] Äkta® Explorer System (GE Health Systems) and Unicorn® Software were used for chromatography. Immobilized metal affinity chromatography (“IMAC”) was performed using a Fractogel EMD chelate® (Merck) which was loaded with ZnCl₂ according to the protocol provided by the manufacturer. The column was equilibrated with buffer A (20 mM sodium phosphate buffer pH 7.2, 0.1 M NaCl) and the cell culture supernatant (500 ml) was applied to the column (10 ml) at a flow rate of 3 ml/min. The column was washed with buffer A to remove unbound sample. Bound protein was eluted using a two step gradient of buffer B (20 mM sodium phosphate buffer pH 7.2, 0.1 M NaCl, 0.5 M Imidazole) according to the following:

[0697] Step 1: 20% buffer B in 6 column volumes

[0698] Step 2: 100% buffer B in 6 column volumes

[0699] Eluted protein fractions from step 2 were pooled for further purification. All chemicals were of research grade and purchased from Sigma (Deisenhofen) or Merck (Darmstadt).

[0700] Gel filtration chromatography was performed on a HiLoad 16/60 Superdex 200 prep grade column (GE/Amersham) equilibrated with Equi-buffer (25 mM Citrate, 200 mM Lysine, 5% Glycerol, pH 7.2). Eluted protein samples (flow rate 1 ml/min) were subjected to standard SDS-PAGE and Western Blot for detection. Prior to purification, the column was calibrated for molecular weight determination (molecular weight marker kit, Sigma MW GF-200). Protein concentrations were determined using OD280 nm.

[0701] Purified bispecific single chain antibody protein was analyzed in SDS PAGE under reducing conditions performed with pre-cast 4-12% Bis Tris gels (Invitrogen). Sample preparation and application were performed according to the protocol provided by the manufacturer. The molecular weight is determined with MultiMark protein standard (Invitrogen). The gel was stained with colloidal Coomassie (Invitrogen protocol). The purity of the isolated protein was >95% as determined by SDS-PAGE.

[0702] The bispecific single chain antibody has a molecular weight of about 52 kDa under native conditions as determined by gel filtration in PBS. All constructs were purified according to this method.

[0703] Western Blot was performed using an Optitran® BA-S83 membrane and the Invitrogen Blot Module according to the protocol provided by the manufacturer. The antibodies used were directed against the histidine₆-tag (Penta His, Qiagen) and Goat-anti-mouse Ig labeled with alkaline phosphatase (AP) (Sigma), and BCIP/NBT (Sigma) as substrate. A single band was detected at 52 kD corresponding to the purified bispecific single chain antibody.

[0704] 28.6 Flow Cytometric Binding Analysis of the CD44 and CD3 Cross-Species Specific Bispecific Antibodies

[0705] In order to test the functionality of the cross-species specific bispecific antibody constructs regarding the capability to bind to human and macaque CD44 and CD3, respectively, a FACS analysis was performed. For this purpose CHO cells transfected with human CD44 as described in Example 28.1 and the human CD3 positive T cell leukemia cell line HPB-ALL (DSMZ, Braunschweig, ACC483) were used to test the binding to human antigens. The binding reactivity to macaque antigens was tested by using the generated macaque CD44 transfectant described in Example 28.3 and macaque PBMC (preparation of macaque PBMC was performed by FicoII gradient centrifugation of peripheral blood from macaque monkeys according to standard protocols). Specificity for the v6 exon of CD44 was tested by using the transfected CHO cells expressing human CD44 without the v6 exon generated as described in Example 28.2. 200.000 cells of the respective cell lines or macaque PBMC were incubated for 30 min. on ice with 50 μl of the purified protein of the cross-species specific bispecific antibody constructs (5 μg/ml) or 50 μl of a commercially available anti-CD44 antibody (Becton Dickinson biosciences, Heidelberg; also 5 μg/ml). The cells were washed twice in PBS with 2% FCS and binding of the construct was detected with a murine anti-His antibody (Penta His antibody; Qiagen; diluted 1:20 in 50 μl PBS with 2% FCS). The anti-His antibody was omitted for the samples incubated with the commercially available anti-CD44 antibody. After washing, bound anti-His antibody or anti-CD44 antibody was detected with an Fc gamma-specific antibody (Dianova) conjugated to phycoerythrin, diluted 1:100 in PBS with 2% FCS. PBS with 2% FCS was used as negative control.

[0706] Flow cytometry was performed on a FACS-Calibur apparatus; the CellQuest software was used to acquire and analyze the data (Becton Dickinson biosciences, Heidelberg). FACS staining and measuring of the fluorescence intensity were performed as described in Current Protocols in Immunology (Coligan, Kruisbeek, Margulies, Shevach and Strober, Wiley-Interscience, 2002).

[0707] The bispecific binding of the single chain molecules listed above, which were cross-species specific for CD44 and cross-species specific for human and non-chimpanzee primate CD3 was clearly detectable as shown in FIG. 43. In the FACS analysis all constructs showed binding to CD3 and CD44 as compared to the respective negative controls. Cross-species specificity of the bispecific antibodies to human and macaque CD3 and CD44 antigens was demonstrated.

[0708] Specificity for the v6 exon of CD44 was demonstrated in FIG. 44 by lack of binding of the constructs to CHO cells transfected with human CD44 lacking the v6 exon. Expression of CD44 by these cells was demonstrated by comparable binding of the commercially available anti-CD44 antibody to those cells and to the CHO cells transfected with the full length human CD44.

[0709] 28.7 Bioactivity of CD44 and CD3 Cross-Species Specific Bispecific Single Chain Antibodies

[0710] Bioactivity of the generated bispecific single chain antibodies was analyzed by chromium 51 (⁵¹Cr) release in vitro cytotoxicity assays using the CD44 positive cell line described in Example 28.1. As effector cells stimulated human CD4/CD56 depleted PBMC were used.

[0711] Generation of stimulated human PBMC was performed as follows:

[0712] A Petri dish (145 mm diameter, Greiner) was coated with a commercially available anti-CD3 specific antibody (e.g. OKT3, Orthoclone) in a final concentration of 1 μg/ml for 1 hour at 37° C. Unbound protein was removed by one washing step with PBS.

[0713] The fresh PBMC were isolated from peripheral blood (30-50 ml human blood) by FicoII gradient centrifugation according to standard protocols. 3-5×10⁷ PBMC were added to the precoated petri dish in 120 ml of RPMI 1640 with stabilized glutamine/10% FCS/IL-2 20 U/ml (Proleukin, Chiron) and stimulated for 2 days. On the third clay the cells were collected and washed once with RPMI 1640. IL-2 was added to a final concentration of 20 U/ml and the cells were cultivated again for one day in the same cell culture medium as above.

[0714] By depletion of CD4+ T cells and CD56+ NK cells according to standard protocols CD8+ cytotoxic T lymphocytes (CTLs) were enriched.

[0715] Target cells were washed twice with PBS and labeled with 11.1 MBq ⁵¹Cr in a final volume of 100 μl RPMI with 50% FCS for 45 minutes at 37° C. Subsequently the labeled target cells were washed 3 times with 5 ml RPMI and then used in the cytotoxicity assay. The assay was performed in a 96 well plate in a total volume of 250 μl supplemented RPMI (as above) with an E:T ratio of 10:1. 1 μg/ml of the cross-species specific bispecific single chain antibody molecules and 20 threefold dilutions thereof were applied. The assay time was 18 hours and cytotoxicity was measured as relative values of released chromium in the supernatant related to the difference of maximum lysis (addition of Triton-X) and spontaneous lysis (without effector cells). All measurements were done in quadruplicates. Measurement of chromium activity in the supernatants was performed with a Wizard 3″ gamma counter (Perkin Elmer Life Sciences GmbH, Köln, Germany). Analysis of the experimental data was performed with Prism 4 for Windows (version 4.02, GraphPad Software Inc., San Diego, Calif., USA). Sigmoidal dose response curves typically have R² values >0.90 as determined by the software. EC₅₀ values calculated by the analysis program were used for comparison of bioactivity.

[0716] As shown in FIG. 45 the generated cross-species specific bispecific single chain antibody constructs demonstrated cytotoxic activity against human CD44 positive target cells elicited by stimulated human CD4/CD56 depleted PBMC.

[0717] 29. Generation and Characterization of CD30 and CD3 Cross-Species Specific Bispecific Single Chain Molecules

[0718] 29.1 Generation of CHO Cells Expressing Human CD30

[0719] The coding sequence of human CD30 as published in GenBank (Accession number

[0720] M83554) was obtained by gene synthesis according to standard protocols. The gene synthesis fragment was designed as to contain first a Kozak site for eukaryotic expression of the construct, followed by a 19 amino acid immunoglobulin leader peptide, followed in frame by the coding sequence of the mature human CD30 protein and a stop codon (the cDNA and amino acid sequence of the construct is listed under SEQ ID Nos 1103 and 1104). The gene synthesis fragment was also designed as to introduce restriction sites at the beginning and at the end of the fragment. The introduced restriction sites, EcoRI at the 5′ end and SalI at the 3′ end, were utilised in the following cloning procedures. Internal restriction sites were removed by silent mutation of the coding sequence in the gene synthesis fragment (BsrGI: nucleotide 243 from T to C; SalI: nucleotide 327 from A to G; SalI: nucleotide 852 from A to G; EcoRI: nucleotide 1248 from T to C). The gene synthesis fragment was cloned via EcoRI and SalI into a plasmid designated pEF-DHFR (pEF-DHFR is described in Raum et al. Cancer Immunol Immunother 50 (2001) 141-150) following standard protocols. The afore-mentioned procedures were carried out according to standard protocols (Sambrook, Molecular Cloning; A Laboratory Manual, 3rd edition, Cold Spring Harbour Laboratory Press, Cold Spring Harbour, N.Y. (2001)). A clone with sequence-verified nucleotide sequence was transfected into DHFR deficient CHO cells for eukaryotic expression of the construct. Eukaryotic protein expression in DHFR deficient CHO cells was performed as described by Kaufmann R. J. (1990) Methods Enzymol. 185, 537-566. Gene amplification of the construct was induced by increasing concentrations of methotrexate (MTX) to a final concentration of up to 20 nM MTX.

[0721] 29.2 Generation of CHO Cells Expressing Macaque CD30

[0722] The cDNA sequence of macaque CD30 was obtained by a set of 4 PCRs on cDNA from macaque monkey bone marrow prepared according to standard protocols. The following reaction conditions: 1 cycle at 94° C. for 2 minutes followed by 35 cycles with 94° C. for 1 minute, 55° C. for 1 minute and 72° C. for 1 minute followed by a terminal cycle of 72° C. for 3 minutes and the following primers were used:

```
6. forward primer:
      5′-cctcgccgcgctgggactgc-3′
      reverse primer:
      5′-ggtgccactggagggttccttgc-3′
7. forward primer:
      5′-gcttcttccattctgtctgcccagcagg-3′
      reverse primer:
      5′-ggtaggggacacagcgggcacaggagttgg-3′
8. forward primer:
      5′-cctggcatgatctgtgccacatcagcc-3′
      reverse primer:
      5′-gcgttgagctcctcctgggtctgg-3′
9. forward primer:
      5′-cctcccrgcccaagctagagcttgtgg-3′
      reverse primer:
      5′-cgactctagagcggccgctcactttccagaggcagctgtgggca
      aggggtcttctttcccttcc-3′
```

[0723] The PCR reactions were performed under addition of PCR grade betain to a final concentration of 1M. Those PCRs generate four overlapping fragments, which were isolated and sequenced according to standard protocols using the PCR primers, and thereby provide a portion of the cDNA sequence coding macaque CD30 from codon 12 of the leader peptide to codon 562 of the mature protein. To generate a construct for expression of macaque CD30 a cDNA fragment was obtained by gene synthesis according to standard protocols (the cDNA and amino acid sequence of the construct is listed under SEQ ID Nos 1105 and 1106). In this construct the coding sequence for macaque CD30 from amino acid 12 of the leader peptide to amino acid 562 of the mature CD30 protein was fused into the coding sequence of human CD30 replacing the respective part of the human coding sequence. The gene synthesis fragment was also designed as to contain a Kozak site for eukaryotic expression of the construct and restriction sites at the beginning and the end of the fragment containing the cDNA coding for the whole extracellular domain of macaque CD30, the macaque CD30 transmembrane domain and a macaque-human chimeric intracellular CD30 domain. The introduced restriction sites XbaI at the 5′ end and Sail at the 3′ end, were utilized in the following cloning procedures. The gene synthesis fragment was then cloned via XbaI and SalI into a plasmid designated pEF-DHFR (pEF-DHFR is described in Raum et al. Cancer Immunol Immunother 50 (2001) 141-150). A sequence verified clone of this plasmid was used to transfect CHO/dhfr− cells as described above.

[0724] 29.3 Generation of CD30 and CD3 Cross-Species Specific Bispecific Single Chain Molecules

[0725] Cloning of Cross-Species Specific Binding Molecules

[0726] Generally, bispecific single chain antibody molecules, each comprising a domain with a binding specificity cross-species specific for human and non-chimpanzee primate CD3epsilon as well as a domain with a binding specificity cross-species specific for human and non-chimpanzee primate CD30, were designed as set out in the following Table 12:

TABLE 12
Formats of anti-CD3 and anti-CD30 cross-species specific
bispecific single chain antibody molecules

| SEQ ID | Formats of protein constructs |
|---|---|
| (nucl/prot) | (N → C) |
| 1126/1125 | M911HL × I2CHL |
| 1139/1138 | SR3HL × I2CHL |

[0727] The aforementioned constructs containing the variable light-chain (L) and variable heavy-chain (H) domains cross-species specific for human and macaque CD30 and the CD3 specific VH and VL combinations cross-species specific for human and macaque CD3 were obtained by gene synthesis. The gene synthesis fragments were designed as to contain first a Kozak site for eukaryotic expression of the construct, followed by a 19 amino acid immunoglobulin leader peptide, followed in frame by the coding sequence of the respective bispecific single chain antibody molecule, followed in frame by the coding sequence of a 6 histidine tag and a stop codon. The gene synthesis fragment was also designed as to introduce suitable restriction sites at the beginning and at the end of the fragment. The introduced restriction sites were utilised in the following cloning procedures. The gene synthesis fragment was cloned via these restriction sites into a plasmid designated pEF-DHFR (pEF-DHFR is described in Raum et al. Cancer Immunol Immunother 50 (2001) 141-150) following standard protocols. The aforementioned procedures were carried out according to standard protocols (Sambrook, Molecular Cloning; A Laboratory Manual, 3rd edition, Cold Spring Harbour Laboratory Press, Cold Spring Harbour, N.Y. (2001)). A clone with sequence-verified nucleotide sequence was transfected into DHFR deficient CHO cells for eukaryotic expression of the construct. Eukaryotic protein expression in DHFR deficient CHO cells was performed as described by Kaufmann R. J. (1990) Methods Enzymol. 185, 537-566. Gene amplification of the construct was induced by increasing concentrations of methotrexate (MTX) to a final concentration of up to 20 nM MTX.

[0728] 29.4 Expression and Purification of the Bispecific Single Chain Antibody Molecules

[0729] The bispecific single chain antibody molecules were expressed in Chinese hamster ovary cells (CHO). Eukaryotic protein expression in DHFR deficient CHO cells was performed as described by Kaufmann R. J. (1990) Methods Enzymol. 185, 537-566. Gene amplification of the constructs was induced by addition of increasing concentrations of MTX up to final concentrations of 20 nM MTX. After two passages of stationary culture the cells were grown in roller bottles with nucleoside-free HyQ PF CHO liquid soy medium (with 4.0 mM L-Glutamine with 0.1% Pluronic F-68; HyClone) for 7 days before harvest. The cells were removed by centrifugation and the supernatant containing the expressed protein was stored at −20° C. Alternatively, constructs were transiently expressed in HEK 293 cells. Transfection was performed with 293fectin reagent (Invitrogen, #12347-019) according to the manufacturer's protocol.

[0730] Äkta® Explorer System (GE Health Systems) and Unicorn@ Software were used for chromatography. Immobilized metal affinity chromatography (“IMAC”) was performed using a Fractogel EMD chelate® (Merck) which was loaded with ZnCl₂ according to the protocol provided by the manufacturer. The column was equilibrated with buffer A (20 mM sodium phosphate buffer pH 7.2, 0.1 M NaCl) and the cell culture supernatant (500 ml) was applied to the column (10 ml) at a flow rate of 3 ml/min. The column was washed with buffer A to remove unbound sample. Bound protein was eluted using a two step gradient of buffer B (20 mM sodium phosphate buffer pH 7.2, 0.1 M NaCl, 0.5 M Imidazole) according to the following procedure:

[0731] Step 1: 20% buffer B in 6 column volumes

[0732] Step 2: 100% buffer B in 6 column volumes

[0733] Eluted protein fractions from step 2 were pooled for further purification. All chemicals are of research grade and purchased from Sigma (Deisenhofen) or Merck (Darmstadt).

[0734] Gel filtration chromatography was performed on a HiLoad 16/60 Superdex 200 prep grade column (GE/Amersham) equilibrated with Equi-buffer (25 mM Citrate, 200 mM Lysine, 5% Glycerol, pH 7.2). Eluted protein samples (flow rate 1 ml/min) were subjected to standard SDS-PAGE and Western Blot for detection. Prior to purification, the column was calibrated for molecular weight determination (molecular weight marker kit, Sigma MW GF-200). Protein concentrations were determined using OD280 nm.

[0735] Purified bispecific single chain antibody protein was analyzed in SDS PAGE under reducing conditions performed with pre-cast 4-12% Bis Tris gels (Invitrogen). Sample preparation and application were performed according to the protocol provided by the manufacturer. The molecular weight was determined with MultiMark protein standard (Invitrogen). The gel was stained with colloidal Coomassie (Invitrogen protocol). The purity of the isolated protein was >95% as determined by SDS-PAGE.

[0736] The bispecific single chain antibody has a molecular weight of about 52 kDa under native conditions as determined by gel filtration in PBS. All constructs were purified according to this method.

[0737] Western Blot was performed using an Optitran® BA-S83 membrane and the Invitrogen Blot Module according to the protocol provided by the manufacturer. The antibodies used were directed against the His Tag (Penta His, Qiagen) and Goat-anti-mouse Ig labeled with alkaline phosphatase (AP) (Sigma), and BCIP/NBT (Sigma) as substrate. A single band was detected at 52 kD corresponding to the purified bispecific single chain antibody.

[0738] 29.5 Flow Cytometric Binding Analysis of the CD30 and CD3 Cross-Species Specific Bispecific Antibodies

[0739] In order to test the functionality of the cross-species specific bispecific antibody constructs regarding the capability to bind to human and macaque CD30 and CD3, respectively, a FACS analysis was performed. For this purpose CHO cells transfected with human CD30 as described in Example 29.1, the human CD30 positive B cell line MEC-1 (DSMZ, Braunschweig, ACC 497) and the human CD3 positive T cell leukemia cell line HPB-ALL (DSMZ, Braunschweig, ACC483) were used to test the binding to human antigens. The binding reactivity to macaque antigens was tested by using the generated macaque CD30 transfectant described in Example 29.2 and a macaque T cell line 4119LnPx (kindly provided by Prof Fickenscher, Hygiene Institute, Virology, Erlangen-Nuernberg; published in Knappe A, et al., and Fickenscher H., Blood 2000, 95, 3256-61). 200.000 cells of the respective cell lines were incubated for 30 min on ice with 50 μl of the purified protein of the cross-species specific bispecific antibody constructs (5 μg/ml). The cells were washed twice in PBS with 2% FCS and binding of the construct was detected with a murine Penta His antibody (Qiagen; diluted 1:20 in 50 μl PBS with 2% FCS). After washing, bound anti His antibodies were detected with an Fc gamma-specific antibody (Dianova) conjugated to phycoerythrin, diluted 1:100 in PBS with 2% FCS. PBS with 2% FCS was used as a negative control.

[0740] Flow cytometry was performed on a FACS-Calibur apparatus, the CellQuest software was used to acquire and analyze the data (Becton Dickinson biosciences, Heidelberg). FACS staining and measuring of the fluorescence intensity were performed as described in Current Protocols in Immunology (Coligan, Kruisbeek, Margulies, Shevach and Strober, Wiley-Interscience, 2002).

[0741] The bispecific binding of the single chain molecules listed above, which are cross-species specific for CD30 and cross-species specific for human and non-chimpanzee primate CD3 was clearly detectable as shown in FIG. 46. In the FACS analysis all constructs showed binding to CD3 and CD30 compared to the negative control. Cross-species specificity of the bispecific antibodies to human and macaque CD3 and CD30 antigens was demonstrated.

[0742] 29.6 Bioactivity of CD30 and CD3 Cross-Species Specific Bispecific Single Chain Antibodies

[0743] Bioactivity of the generated bispecific single chain antibodies was analyzed by chromium 51 (⁵¹Cr) release in vitro cytotoxicity assays using the human CD30 positive B cell line MEC-1 (DSMZ, Braunschweig, ACC 497) and the CHO cells transfected with macaque CD30 described in Example 29.2. As effector cells stimulated human CD4/CD56 depleted PBMC or the macaque T cell line 4119LnPx were used, respectively.

[0744] Generation of stimulated human PBMC was performed as follows:

[0745] A Petri dish (145 mm diameter, Greiner bio-one GmbH, Kremsmünster) was coated with a commercially available anti-CD3 specific antibody (e.g. OKT3, Orthoclone) in a final concentration of 1 μg/ml for 1 hour at 37° C. Unbound protein was removed by one washing step with PBS. The fresh PBMC were isolated from peripheral blood (30-50 ml human blood) by FicoII gradient centrifugation according to standard protocols. 3-5×10⁷ PBMC were added to the precoated petri dish in 120 ml of RPMI 1640 with stabilized glutamine/10% FCS/IL-2 20 U/ml (Proleukin, Chiron) and stimulated for 2 days. On the third day the cells were collected and washed once with RPMI 1640. IL-2 was added to a final concentration of 20 U/ml and the cells were cultivated again for one day in the same cell culture medium as above.

[0746] By depletion of CD4+ T cells and CD56+ NK cells according to standard protocols CD8+ cytotoxic T lymphocytes (CTLs) were enriched.

[0747] Target cells were washed twice with PBS and labelled with 11.1 MBq ⁵¹Cr in a final volume of 100 μl RPMI with 50% FCS for 60 minutes at 37° C. Subsequently the labelled target cells were washed 3 times with 5 ml RPMI and then used in the cytotoxicity assay. The assay was performed in a 96 well plate in a total volume of 250 μl supplemented RPMI (as above) with an E:T ratio of 10:1. 1 μg/ml of the cross-species specific bispecific single chain antibody molecules and 20 threefold dilutions thereof were applied. The assay time was 4 hours for the assay using MEC-1 and human CD4/CD56 depleted PBMC and 18 hours for the assay using the macaque CD30 transfected CHO and the macaque T cell line 4119LnPx. Cytotoxicity was measured as relative values of released chromium in the supernatant related to the difference of maximum lysis (addition of Triton-X) and spontaneous lysis (without effector cells). All measurements were done in quadruplicates. Measurement of chromium activity in the supernatants was performed with a Wizard 3″ gammacounter (Perkin Elmer Life Sciences GmbH, Köln, Germany). Analysis of the experimental data was performed with Prism 4 for Windows (version 4.02, GraphPad Software Inc., San Diego, Calif., USA). Sigmoidal dose response curves typically have R² values >0.90 as determined by the software. EC₅₀ values calculated by the analysis program were used for comparison of bioactivity.

[0748] As shown in FIG. 47 all of the generated cross-species specific bispecific single chain antibody constructs demonstrated cytotoxic activity against human CD30 positive target cells elicited by stimulated human CD4/CD56 depleted PBMC and macaque CD30 positive target cells elicited by the macaque T cell line 4119LnPx.

[0749] 30. Generation and Characterization of HER2 and CD3 Cross-Species Specific Bispecific Single Chain Molecules

[0750] 30.1 Generation of CHO Cells Expressing Human HER2

[0751] The coding sequence of human HER2 as published in GenBank (Accession number X03363) was obtained by gene synthesis according to standard protocols. The gene synthesis fragment was designed as to contain the coding sequence of the human HER2 protein including its leader peptide (the cDNA and amino acid sequence of the construct is listed under SEQ ID Nos 1107 and 1108. The gene synthesis fragment was also designed as to introduce restriction sites at the beginning and at the end of the fragment. The introduced restriction sites, XbaI at the 5′ end and SalI at the 3′ end, were utilised in the following cloning procedures. The gene synthesis fragment was cloned via XbaI and SalI into a plasmid designated pEF-DHFR (pEF-DHFR is described in Raum et al. Cancer Immunol Immunother 50 (2001) 141-150) following standard protocols. The aforementioned procedures were carried out according to standard protocols (Sambrook, Molecular Cloning; A Laboratory Manual, 3rd edition, Cold Spring Harbour Laboratory Press, Cold Spring Harbour, N.Y. (2001)). A clone with sequence-verified nucleotide sequence was transfected into DHFR deficient CHO cells for eukaryotic expression of the construct. Eukaryotic protein expression in DHFR deficient CHO cells was performed as described by Kaufmann R. J. (1990) Methods Enzymol. 185, 537-566. Gene amplification of the construct was induced by increasing concentrations of methotrexate (MTX) to a final concentration of up to 20 nM MTX.

[0752] 30.2 Generation of CHO Cells Expressing the Extracellular Domain of Macaque HER2

[0753] The coding sequence of human HER2 as described above was modified to encode the amino acids 123 to 1038 of the macaque HER2 protein as published in GenBank (Accession number XP_{—}001090430). The coding sequence for this chimeric protein was obtained by gene synthesis according to standard protocols (the cDNA and amino acid sequence of the construct is listed under SEQ ID Nos 1109 and 1110). The gene synthesis fragment was also designed as to contain a Kozak site for eukaryotic expression of the construct and restriction sites at the beginning and the end of the fragment. The introduced restriction sites XbaI at the 5′ end and SalI at the 3′ end, were utilized in the following cloning procedures. The gene synthesis fragment was then cloned via XbaI and SalI into a plasmid designated pEF-DHFR (pEF-DHFR is described in Raum et al. Cancer Immunol Immunother 50 (2001) 141-150). A sequence verified clone of this plasmid was used to transfect CHO/dhfr− cells as described above.

[0754] 30.3 Generation of HER2 and CD3 Cross-Species Specific Bispecific Single Chain Molecules

[0755] Cloning of Cross-Species Specific Binding Molecules

[0756] Generally, bispecific single chain antibody molecules, each comprising a domain with a binding specificity cross-species specific for human and non-chimpanzee primate CD3epsilon as well as a domain with a binding specificity cross-species specific for human and macaque HER2, are designed as set out in the following Table 13:

TABLE 13
Formats of anti-CD3 and anti-HER2 cross-species specific
bispecific single chain antibody molecules

| SEQ ID | Formats of protein constructs |
|---|---|
| (nucl/prot) | (N → C) |
| 1153/1152 | 2D3 HL × I2C HL |
| 1167/1166 | 3E1 HL × I2C HL |

[0757] The aforementioned constructs containing the variable light-chain (L) and variable heavy-chain (H) domains cross-species specific for human and macaque HER2 and the CD3 specific VH and VL combinations cross-species specific for human and macaque CD3 were obtained by gene synthesis. The gene synthesis fragments were designed as to contain first a Kozak site for eukaryotic expression of the construct, followed by a 19 amino acid immunoglobulin leader peptide, followed in frame by the coding sequence of the respective bispecific single chain antibody molecule, followed in frame by the coding sequence of a 6 histidine tag and a stop codon. The gene synthesis fragment was also designed as to introduce suitable restriction sites at the beginning and at the end of the fragment. The introduced restriction sites were utilised in the following cloning procedures. The gene synthesis fragment was cloned via these restriction sites into a plasmid designated pEF-DHFR (pEF-DHFR is described in Raum et al. Cancer Immunol Immunother 50 (2001) 141-150) following standard protocols. The aforementioned procedures were carried out according to standard protocols (Sambrook, Molecular Cloning; A Laboratory Manual, 3rd edition, Cold Spring Harbour Laboratory Press, Cold Spring Harbour, N.Y. (2001)). A clone with sequence-verified nucleotide sequence was transfected into DHFR deficient CHO cells for eukaryotic expression of the construct. Eukaryotic protein expression in DHFR deficient CHO cells was performed as described by Kaufmann R. J. (1990) Methods Enzymol. 185, 537-566. Gene amplification of the construct was induced by increasing concentrations of methothrexate (MTX) to a final concentration of up to 20 nM MTX.

[0758] 30.4 Expression and Purification of the Bispecific Single Chain Antibody Molecules

[0759] The bispecific single chain antibody molecules were expressed in Chinese hamster ovary cells (CHO). Eukaryotic protein expression in DHFR deficient CHO cells was performed as described by Kaufmann R. J. (1990) Methods Enzymol. 185, 537-566. Gene amplification of the constructs was induced by addition of increasing concentrations of MTX up to final concentrations of 20 nM MTX. After two passages of stationary culture the cells are grown in roller bottles with nucleoside-free HyQ PF CHO liquid soy medium (with 4.0 mM L-Glutamine with 0.1% Pluronic F-68; HyClone) for 7 days before harvest. The cells were removed by centrifugation and the supernatant containing the expressed protein was stored at −80° C. Transfection was performed with 293fectin reagent (Invitrogen, #12347-019) according to the manufacturer's protocol.

[0760] Äkta® Explorer System (GE Health Systems) and Unicorn® Software were used for chromatography. Immobilized metal affinity chromatography (“IMAC”) was performed using a Fractogel EMD chelate® (Merck) which was loaded with ZnCl₂ according to the protocol provided by the manufacturer. The column was equilibrated with buffer A (20 mM sodium phosphate buffer pH 7.2, 0.1 M NaCl) and the cell culture supernatant (500 ml) was applied to the column (10 ml) at a flow rate of 3 ml/min. The column was washed with buffer A to remove unbound sample. Bound protein was eluted using a two step gradient of buffer B (20 mM sodium phosphate buffer pH 7.2, 0.1 M NaCl, 0.5 M Imidazole) according to the following:

[0761] Step 1: 20% buffer B in 6 column volumes

[0762] Step 2: 100% buffer B in 6 column volumes

[0763] Eluted protein fractions from step 2 were pooled for further purification. All chemicals were of research grade and purchased from Sigma (Deisenhofen) or Merck (Darmstadt).

[0764] Gel filtration chromatography was performed on a HiLoad 16/60 Superdex 200 prep grade column (GE/Amersham) equilibrated with Equi-buffer (25 mM Citrate, 200 mM Lysine, 5% Glycerol, pH 7.2). Eluted protein samples (flow rate 1 ml/min) were subjected to standard SDS-PAGE and Western Blot for detection. Prior to purification, the column was calibrated for molecular weight determination (molecular weight marker kit, Sigma MW GF-200). Protein concentrations were determined using OD280 nm.

[0765] Purified bispecific single chain antibody protein was analyzed in SDS PAGE under reducing conditions performed with pre-cast 4-12% Bis Tris gels (Invitrogen). Sample preparation and application were performed according to the protocol provided by the manufacturer. The molecular weight was determined with MultiMark protein standard (Invitrogen). The gel was stained with colloidal Coomassie (Invitrogen protocol). The purity of the isolated protein was >95% as determined by SDS-PAGE.

[0766] The bispecific single chain antibody has a molecular weight of about 52 kDa under native conditions as determined by gel filtration in PBS. All constructs were purified according to this method.

[0767] Western Blot was performed using an Optitran® BA-S83 membrane and the Invitrogen Blot Module according to the protocol provided by the manufacturer. For detection of the bispecific single chain antibody protein antibodies an anti-His Tag antibody was used (Penta His, Qiagen). A Goat-anti-mouse Ig antibody labeled with alkaline phosphatase (AP) (Sigma) was used as secondary antibody and BCIP/NBT (Sigma) as substrate. A single band was detected at 52 kD corresponding to the purified bispecific single chain antibody.

[0768] 30.5 Flow Cytometric Binding Analysis of the HER2 and CD3 Cross-Species Specific Bispecific Antibodies

[0769] In order to test the functionality of the cross-species specific bispecific antibody constructs regarding the capability to bind to human and macaque HER2 and CD3, respectively, a FACS analysis was performed. For this purpose CHO cells transfected with human HER2 as described in Example 30.1 and the human CD3 positive T cell leukemia cell line HPB-ALL (DSMZ, Braunschweig, ACC483) are used to test the binding to human antigens. The binding reactivity to macaque antigens was tested by using the generated macaque HER2 transfectant described in Example 30.2 and a macaque T cell line 4119LnPx (kindly provided by Prof. Fickenscher, Hygiene Institute, Virology, Erlangen-Nuernberg; published in Knappe A, et al., and Fickenscher H., Blood 2000, 95, 3256-61). 200.000 cells of the respective cell lines were incubated for 30 min on ice with 50 μl of the purified protein of the cross-species specific bispecific antibody constructs (2 μg/ml). The cells were washed twice in PBS with 2% FCS and binding of the construct was detected with a murine anti-His antibody (Penta His antibody; Qiagen; diluted 1:20 in 50 μl PBS with 2% FCS). After washing, bound anti-His antibodies were detected with an Fc gamma-specific antibody (Dianova) conjugated to phycoerythrin, diluted 1:100 in PBS with 2% FCS. PBS with 2% FCS was used as negative control for binding to the T cell lines as well as to the HER2 transfected CHO cells.

[0770] Flow cytometry was performed on a FACS-Calibur apparatus; the CellQuest software was used to acquire and analyze the data (Becton Dickinson biosciences, Heidelberg). FACS staining and measuring of the fluorescence intensity were performed as described in Current Protocols in Immunology (Coligan, Kruisbeek, Margulies, Shevach and Strober, Wiley-Interscience, 2002).

[0771] The bispecific binding of the single chain molecules listed above, which are cross-species specific for HER2 and cross-species specific for human and non-chimpanzee primate CD3 was clearly detectable as shown in FIG. 48. In the FACS analysis all constructs showed binding to CD3 and HER2 as compared to the respective negative controls. Cross-species specificity of the bispecific antibodies to human and macaque CD3 and HER2 antigens was demonstrated.

[0772] 30.6 Bioactivity of HER2 and CD3 Cross-Species Specific Bispecific Single Chain Antibodies

[0773] Bioactivity of the generated bispecific single chain antibodies was analyzed by chromium 51 (⁵¹Cr) release in vitro cytotoxicity assays using the HER2 positive cell lines described in Examples 30.1 and 30.2. As effector cells unstimulated human CD56 depleted PBMC or the macaque T cell line 4119LnPx were used as specified in the respective figures.

[0774] Generation of unstimulated human CD56 depleted PBMC was performed as follows:

[0775] The fresh PBMC were isolated from peripheral blood (30-50 ml human blood) by FicoII gradient centrifugation according to standard protocols. Depletion of CD56+ NK cells was carried out according to standard protocols.

[0776] Target cells were washed twice with PBS and labelled with 11.1 MBq ⁵¹Cr in a final volume of 100 μl RPMI with 50% FCS for 45 minutes at 37° C. Subsequently the labelled target cells were washed 3 times with 5 ml RPMI and then used in the cytotoxicity assay. The assay was performed in a 96 well plate in a total volume of 250 μl supplemented RPMI (as above) with an E:T ratio of 10:1. 1 μg/ml of the cross-species specific bispecific single chain antibody molecules and 15-21 fivefold dilutions thereof were applied. The assay time was 18 hours and cytotoxicity was measured as relative values of released chromium in the supernatant related to the difference of maximum lysis (addition of Triton-X) and spontaneous lysis (without effector cells). All measurements were done in quadruplicates. Measurement of chromium activity in the supernatants was performed with a Wizard 3″ gamma counter (Perkin Elmer Life Sciences GmbH, Köln, Germany). Analysis of the experimental data was performed with Prism 4 for Windows (version 4.02, GraphPad Software Inc., San Diego, Calif., USA). Sigmoidal dose response curves typically have R² values >0.90 as determined by the software. EC₅₀ values calculated by the analysis program were used for comparison of bioactivity.

[0777] As shown in FIG. 49, all of the generated cross-species specific bispecific single chain antibody constructs demonstrated cytotoxic activity against human HER2 positive target cells elicited by unstimulated CD56 depleted PBMC and against macaque HER2 positive target cells elicited by the macaque T cell line 4119LnPx.

[0778] 31. Purification of Cross-Species Specific Bispecific Single Chain Molecules by an Affinity Procedure Based on the Context Independent CD3 Epsilon Epitope Corresponding to the N-terminal Amino Acids 1-27

[0779] 31.1 Generation of an Affinity Column Displaying the Isolated Context Independent Human CD3 Epsilon Epitope Corresponding to the N-terminal Amino Acids 1-27

[0780] The plasmid for expression of the construct 1-27 CD3-Fc consisting of the 1-27 N-terminal amino acids of the human CD3 epsilon chain fused to the hinge and Fc gamma region of human immunoglobulin IgG1 described above (Example 3; cDNA sequence and amino acid sequence of the recombinant fusion protein are listed under SEQ ID NOs 350 and 349) was transfected into DHFR deficient CHO cells for eukaryotic expression of the construct. Eukaryotic protein expression in DHFR deficient CHO cells was performed as described by Kaufmann R. J. (1990) Methods Enzymol. 185, 537-566. Gene amplification of the construct was induced by increasing concentrations of methotrexate (MTX) to a final concentration of up to 20 nM MTX. After two passages of stationary culture the cells were grown in roller bottles with nucleoside-free HyQ PF CHO liquid soy medium (with 4.0 mM L-Glutamine with 0.1% Pluronic F-68; HyClone) for 7 days before harvest. The cells were removed by centrifugation and the supernatant containing the expressed protein was stored at −20° C. For the isolation of the fusion protein a goat anti-human fc affinity column was prepared according to standard protocols using a commercially available affinity purified goat anti-human IgG fc fragment specific antibody with minimal cross-reaction to bovine, horse, and mouse serum proteins (Jackson ImmunoResearch Europe Ltd.). Using this affinity column the fusion protein was isolated out of cell culture supernatant on an Äkta Explorer System (GE Amersham) and eluted by citric acid. The eluate was neutralized and concentrated. After dialysis against amine free coupling buffer the purified fusion protein was coupled to an N-Hydroxy-Succinimide NHS activated 1 ml HiTrap column (GE Amersham).

[0781] After coupling remaining NHS groups were blocked and the column was washed and stored at 5° C. in storage buffer containing 0.1% sodium azide.

[0782] 31.2 Purification of Cross-Species Specific Bispecific Single Chain Molecules using a Human CD3 Peptide Affinity Column

[0783] 200 ml cell culture supernatant of cells expressing cross-species specific bispecific single chain molecules were 0.2 μm sterile filtered and applied to the CD3 peptide affinity column using an Äkta Explorer system (GE Amersham).

[0784] The column was then washed with phosphate buffered saline PBS pH 7.4 to wash out unbound sample. Elution was done with an acidic buffer pH 3.0 containing 20 mM Citric acid and 1 M sodium chloride. Eluted protein was neutralized immediately by 1 M Trishydroxymethylamine TRIS pH 8.3 contained in the collection tubes of the fraction collector.

[0785] Protein analysis was done by SDS PAGE and Western Blot.

[0786] For SDS PAGE BisTris Gels 4-12% are used (Invitrogen). The running buffer was 1× MES-SDS-Puffer (Invitrogen). As protein standard 15 μl prestained Sharp Protein Standard (Invitrogen) was applied. Electrophoresis was performed for 60 minutes at 200 volts 120 mA max. Gels were washed in demineralised water and stained with Coomassie for one hour. Gels are destained in demineralised water for 3 hours.

[0787] Pictures are taken with a Syngene Gel documentation system.

[0788] For Western Blot a double of the SDS PAGE gel was generated and proteins were electroblotted onto a nitrocellulose membrane. The membrane was blocked with 2% bovine serum albumin in PBS and incubated with a biotinylated murine Penta His antibody (Qiagen). As secondary reagent a streptavidin alkaline phosphatase conjugate (DAKO) was used. Blots were developed with BCIP/NBT substrate solution (Pierce).

[0789] As demonstrated in FIGS. 50, 51 and 52 the use of a human CD3 peptide affinity column as described above allows the highly efficient purification of the bispecific single chain molecules from cell culture supernatant. The cross-species specific anti-CD3 single chain antibodies contained in the bispecific single chain molecules therefore enable via their specific binding properties an efficient generic one-step method of purification for the cross-species specific bispecific single chain molecules, without the need of any tags solely attached for purification purposes.

[0790] 32. Generic Pharmacokinetic Assay for Cross-Species Specific Bispecific Single Chain Molecules

[0791] 32.1 Production of 1-27 CD3-Fc for use in the Pharmacokinetic Assay

[0792] The coding sequence of the 1-27 N-terminal amino acids of the human CD3 epsilon chain fused to the hinge and Fc gamma region of human immunoglobulin IgG1 was obtained by gene synthesis according to standard protocols (cDNA sequence and amino acid sequence of the recombinant fusion protein are listed under SEQ ID NOs 1111 and 1112). The gene synthesis fragment was designed as to contain first a Kozak site for eukaryotic expression of the construct, followed by a 19 amino acid immunoglobulin leader peptide, followed in frame by the coding sequence of the first 27 amino acids of the extracellular portion of the mature human CD3 epsilon chain, followed in frame by the coding sequence of the hinge region and Fc gamma portion of human IgG1 and a stop codon. The gene synthesis fragment was also designed as to introduce restriction sites at the beginning and at the end of the cDNA coding for the fusion protein. The introduced restriction sites, EcoRI at the 5′ end and SalI at the 3′ end, were utilised in the following cloning procedures. The gene synthesis fragment was cloned via EcoRI and SalI into a plasmid designated pEF-DHFR (pEF-DHFR is described in Raum et al. Cancer Immunol Immunother 50 (2001) 141-150) following standard protocols. The afore-mentioned procedures were carried out according to standard protocols (Sambrook, Molecular Cloning; A Laboratory Manual, 3rd edition, Cold Spring Harbour Laboratory Press, Cold Spring Harbour, N.Y. (2001)). A clone with sequence-verified nucleotide sequence was transfected into DHFR deficient CHO cells for eukaryotic expression of the construct. Eukaryotic protein expression in DHFR deficient CHO cells was performed as described by Kaufmann R. J. (1990) Methods Enzymol. 185, 537-566. Gene amplification of the construct was induced by increasing concentrations of methotrexate (MTX) to a final concentration of up to 20 nM MTX. After two passages of stationary culture the cells were grown in roller bottles with nucleoside-free HyQ PF CHO liquid soy medium (with 4.0 mM L-Glutamine with 0.1% Pluronic F-68; HyClone) for 7 days before harvest. The cells were removed by centrifugation and the supernatant containing the expressed protein was stored at −20° C. For the isolation of the fusion protein a goat anti-human fc affinity column was prepared according to standard protocols using a commercially available affinity purified goat anti-human IgG fc fragment specific antibody with minimal cross-reaction to bovine, horse, and mouse serum proteins (Jackson ImmunoResearch Europe Ltd.). Using this affinity column the fusion protein was isolated out of cell culture supernatant on an Äkta Explorer System (GE Amersham) and eluted by citric acid. The eluate was neutralized and concentrated.

[0793] 32.2 Pharmacokinetic Assay for Cross-Species Specific Bispecific Single Chain Molecules

[0794] The assay is based on the ECL-ELISA technology using ruthenium labelled detection on carbon plates measured on a Sektor Imager device (MSD). In a first step, carbon plates (MSD High Bind Plate 96 well Cat: L15xB-3) were coated with 5 μl/well at 50 ng/ml of the purified 1-27 CD3-Fc described in Example 32.1. The plate was then dried overnight at 25° C. Subsequently plates were blocked with 5% BSA (Paesel&Lorei #100568) in PBS at 150 μl/well for 1h at 25° C. in an incubator while shaking (700 rpm). In the next step plates were washed three times with 0.05% Tween in PBS. A standard curve in 50% macaque serum in PBS was generated by serial 1:4 dilution starting at 100 ng/ml of the respective cross-species specific bispecific single chain molecule to be detected in the assay. Quality control (QC) samples were prepared in 50% macaque serum in PBS ranging from 1 ng/ml to 50 ng/ml of the respective cross-species specific bispecific single chain molecule dependent on the expected sample serum concentrations. Standard, QC or unknown samples were transferred to the carbon plates at 10 μl/well and incubated for 90 min at 25° C. in the incubator while shaking (700 rpm). Subsequently plates were washed three times with 0.05% Tween in PBS. For detection 25 μl/well of penta-His-Biotin antibody (Qiagen, 200 μg/ml in 0.05% Tween in PBS) was added and incubated for 1 h at 25° C. in an incubator while shaking (700 rpm). In a second detection step 25 μl/well Streptavidin-SulfoTag solution (MSD; Cat: R32AD-1; Lot: W0010903) was added and incubated for 1 h at 25° C. in an incubator while shaking (700 rpm). Subsequently plates were washed three times with 0.05% Tween in PBS. Finally 150 μl/well MSD Reading Buffer (MSD, Cat: R9ZC-1) was added and plates were read in the Sektor Imager device.

[0795] FIGS. 53 and 54 demonstrate the feasibility of detection of cross-species specific bispecific single chain molecules in serum samples of macaque monkeys for cross-species specific bispecific single chain molecules. The cross-species specific anti-CD3 single chain antibodies contained in the bispecific single chain molecules enable therefore via their specific binding properties a highly sensitive generic assay for detection of the cross-species specific bispecific single chain molecules. The assay set out above can be used in the context of formal toxicological studies that are needed for drug development and can be easily adapted for measurement of patient samples in connection with the clinical application of cross-species specific bispecific single chain molecules.

[0796] 33. Generation of Recombinant Transmembrane Fusion Proteins of the N-terminal Amino Acids 1-27 of CD3 Epsilon from Different Non-Chimpanzee Primates Fused to EpCAM from Cynomolgus Monkey (1-27 CD3-EpCAM).

[0797] 33.1 Cloning and Expression of 1-27 CD3-EpCAM

[0798] CD3 epsilon was isolated from different non-chimpanzee primates (marmoset, tamarin, squirrel monkey) and swine. The coding sequences of the 1-27 N-terminal amino acids of CD3 epsilon chain of the mature human, common marmoset (Callithrix jacchus), cottontop tamarin (Saguinus oedipus), common squirrel monkey (Saimiri sciureus) and domestic swine (Sus scrota; used as negative control) fused to the N-terminus of Flag tagged cynomolgus EpCAM were obtained by gene synthesis according to standard protocols (cDNA sequence and amino acid sequence of the recombinant fusion proteins are listed under SEQ ID NOs 351 to 360). The gene synthesis fragments were designed as to contain first a BsrGl site to allow for fusion in correct reading frame with the coding sequence of a 19 amino acid immunoglobulin leader peptide already present in the target expression vector, which was followed in frame by the coding sequence of the N-terminal 1-27 amino acids of the extracellular portion of the mature CD3 epsilon chains, which was followed in frame by the coding sequence of a Flag tag and followed in frame by the coding sequence of the mature cynomolgus EpCAM transmembrane protein. The gene synthesis fragments were also designed to introduce a restriction site at the end of the cDNA coding for the fusion protein. The introduced restriction sites BsrGl at the 5′ end and SalI at the 3′ end, were utilized in the following cloning procedures. The gene synthesis fragments were then cloned via BsrGl and SalI into a derivative of the plasmid designated pEF-DHFR (pEF-DHFR is described in Raum et al. Cancer Immunol Immunother 50 (2001) 141-150), which already contains the coding sequence of the 19 amino acid immunoglobulin leader peptide following standard protocols. Sequence verified plasmids were used to transfect DHFR deficient CHO cells for eukaryotic expression of the construct. Eukaryotic protein expression in DHFR deficient CHO cells was performed as described by Kaufmann R. J. (1990) Methods Enzymol. 185, 537-566. Gene amplification of the construct was induced by increasing concentrations of methotrexate (MTX) to a final concentration of up to 20 nM MTX.

[0799] Transfectants were tested for cell surface expression of the recombinant transmembrane protein via an FACS assay according to standard protocols. For that purpose a number of 2.5×10⁵ cells were incubated with 50 μl of the anti-Flag M2 antibody (Sigma-Aldrich Chemie GmbH, Taufkirchen, Germany) at 5 μg/ml in PBS with 2% FCS. Bound antibody was detected with an R-Phycoerythrin-conjugated affinity purified F(ab′)2 fragment, goat anti-mouse IgG, Fc-gamma fragment specific 1:100 in PBS with 2% FCS (Jackson ImmunoResearch Europe Ltd., Newmarket, Suffolk, UK). Flow cytometry was performed on a FACS-Calibur apparatus, the CellQuest software was used to acquire and analyze the data (Becton Dickinson biosciences, Heidelberg). FACS staining and measuring of the fluorescence intensity were performed as described in Current Protocols in Immunology (Coligan, Kruisbeek, Margulies, Shevach and Strober, Wiley-Interscience, 2002).

[0800] Expression of the Flag tagged recombinant transmembrane fusion proteins consisting of cynomolgus EpCAM and the 1-27 N-terminal amino acids of the human, marmoset, tamarin, squirrel monkey and swine CD3 epsilon chain respectively on transfected cells is clearly detectable (FIG. 55).

[0801] 33.2 Cloning and Expression of the Cross-Species Specific Anti-CD3 Single Chain Antibody I2C HL in Form of an IgG1 Antibody

[0802] In order to provide improved means of detection of binding of the cross-species specific single chain anti-CD3 antibody the I2C VHVL specificity is converted into an IgG1 antibody with murine IgG1 and murine kappa constant regions. cDNA sequences coding for the heavy chain of the IgG antibody were obtained by gene synthesis according to standard protocols. The gene synthesis fragments were designed as to contain first a Kozak site to allow for eukaryotic expression of the construct, which is followed by an 19 amino acid immunoglobulin leader peptide, which is followed in frame by the coding sequence of the heavy chain variable region or light chain variable region, followed in frame by the coding sequence of the heavy chain constant region of murine IgG1 as published in GenBank (Accession number AB097849) or the coding sequence of the murine kappa light chain constant region as published in GenBank (Accession number D14630), respectively.

[0803] Restriction sites were introduced at the beginning and the end of the cDNA coding for the fusion protein. Restriction sites EcoRI at the 5′ end and SalI at the 3′ end were used for the following cloning procedures. The gene synthesis fragments were cloned via EcoRI and SalI into a plasmid designated pEF-DHFR (pEF-DHFR is described in Raum et al. Cancer Immunol Immunother 50 (2001) 141-150) for the heavy chain construct and pEFADA (pEFADA is described in Raum et al. Cancer Immunol Immunother 50 (2001) 141-150) for the light chain construct according to standard protocols. Sequence verified plasmids were used for co-transfection of respective light and heavy chain constructs into DHFR deficient CHO cells for eukaryotic expression of the construct. Eukaryotic protein expression in DHFR deficient CHO cells was performed as described by Kaufmann R. J. (1990) Methods Enzymol. 185, 537-566. Gene amplification of the constructs was induced by increasing concentrations of methotrexate (MTX) to a final concentration of up to 20 nM MTX and deoxycoformycin (dCF) to a final concentration of up to 300 nM dCF.

[0804] After two passages of stationary culture cell culture supernatant was collected and used in the subsequent experiment.

[0805] 33.3 Binding of the Cross-Species Specific Anti-CD3 Single Chain Antibody I2C HL in Form of an IgG1 Antibody to 1-27 CD3-EpCAM

[0806] Binding of the generated I2C IgG1 construct to the 1-27 N-terminal amino acids of the human, marmoset, tamarin and squirrel monkey CD3 epsilon chains respectively fused to cynomolgus Ep-CAM as described in Example 33.1 was tested in a FACS assay according to standard protocols. For that purpose a number of 2.5×10⁵ cells were incubated with 50 μl of cell culture supernatant containing the I2C IgG1 construct as described in Example 33.2. The binding of the antibody was detected with an R-Phycoerythrin-conjugated affinity purified F(ab′)2 fragment, goat anti-mouse IgG, Fc-gamma fragment specific, diluted 1:100 in PBS with 2% FCS (Jackson ImmunoResearch Europe Ltd., Newmarket, Suffolk, UK). Flow cytometry was performed on a FACS-Calibur apparatus, the CellQuest software was used to acquire and analyze the data (Becton Dickinson biosciences, Heidelberg). FACS staining and measuring of the fluorescence intensity were performed as described in Current Protocols in Immunology (Coligan, Kruisbeek, Margulies, Shevach and Strober, Wiley-Interscience, 2002).

[0807] As shown in FIG. 56 binding of the I2C IgG1 construct to the transfectants expressing the recombinant transmembrane fusion proteins consisting of the 1-27 N-terminal amino acids of CD3 epsilon of human, marmoset, tamarin or squirrel monkey fused to cynomolgus EpCAM as compared to the negative control consisting of the 1-27 N-terminal amino acids of CD3 epsilon of swine fused to cynomolgus EpCAM was observed. Thus multi-primate cross-species specificity of I2C was demonstrated. Signals obtained with the anti Flag M2 antibody and the I2C IgG1 construct were comparable, indicating a strong binding activity of the cross-species specific specificity I2C to the N-terminal amino acids 1-27 of CD3 epsilon.

[0808] 34. Binding of the Cross-Species Specific Anti-CD3 binding Molecule I2C to the Human CD3 Epsilon Chain with and Without N-terminal His6 Tag

[0809] A chimeric IgG1 antibody with the binding specificity I2C as described in Example 33.2 specific for CD3 epsilon was tested for binding to human CD3 epsilon with and without N-terminal His6 tag. Binding of the antibody to the EL4 cell lines transfected with His6-human CD3 epsilon as described in Example 6.1 and wild-type human CD3 epsilon as described in Example 5.1 respectively was tested by a FACS assay according to standard protocols. 2.5×10⁵ cells of the transfectants were incubated with 50 μl of cell culture supernatant containing the I2C IgG1 construct or 50 μl of the respective control antibodies at 5 μg/ml in PBS with 2% FCS. As negative control an appropriate isotype control and as positive control for expression of the constructs the CD3 specific antibody UCHT-1 were used respectively. Detection of the His6 tag was performed with the penta His antibody (Qiagen). The binding of the antibodies was detected with a R-Phycoerythrin-conjugated affinity purified F(ab′)2 fragment, goat anti-mouse IgG, Fc-gamma fragment specific, diluted 1:100 in PBS with 2% FCS (Jackson ImmunoResearch Europe Ltd., Newmarket, Suffolk, UK). Flow cytometry was performed on a FACS-Calibur apparatus, the CellQuest software was used to acquire and analyze the data (Becton Dickinson biosciences, Heidelberg). FACS staining and measuring of the fluorescence intensity were performed as described in Current Protocols in Immunology (Coligan, Kruisbeek, Margulies, Shevach and Strober, Wiley-Interscience, 2002).

[0810] Comparable binding of the anti-human CD3 antibody UCHT-1 to both transfectants demonstrates approximately equal levels of expression of the constructs. The binding of the penta His antibody confirmed the presence of the His6 tag on the His6-human CD3 construct but not on the wild-type construct.

[0811] Compared to the EL4 cell line transfected with wild-type human CD3 epsilon a clear loss of binding of the I2C IgG1 construct to human-CD3 epsilon with an N-terminal His6 tag was detected. These results show that a free N-terminus of CD3 epsilon is essential for binding of the cross-species specific anti-CD3 binding specificity I2C to the human CD3 epsilon chain (FIG. 57).

[0812] 35. Bispecific Single Chain Antibody Constructs Directed to Human and Non-Chimpanzee Primate CD3 and to Tumor Specific Epitopes of Muc-1

[0813] The human antibody germline VH sequence VH3 3-72 (http://vbase.mrc-cpe.cam.ac.uk/) was chosen as framework context for CDRH1 (SEQ ID 1486), CDRH2 (SEQ ID 1487) and CDRH3 (SEQ ID 1488). Likewise human antibody germline VH sequence VH3 3-73 (http://vbase.mrc-cpe.cam.ac.uk/) was chosen as framework context for CDRH1 (SEQ ID 1492), CDRH2 (SEQ ID 1493) and CDRH3 (SEQ ID 1494). For each human VH several degenerated oligonucleotides had to be synthesized that overlap in a terminal stretch of approximately 15-20 nucleotides. To this end every second primer was an antisense primer. For VH3 3-72 the following oligonucleotides were used:

5′ VH72-A-XhoI
GAAGTGAAGCTTCTCGAGTCTGGAGGAGGCTTGGTGCAACCTGGAGGATC
CMTGARACTCTCTTGTGCTGCT
3′ VH72-B
CTGGCGGACCCAGTCCATCCAGGCATCACTAAAAGTGAATCCAGAAGCAG
CACAAGAGAG
5′ VH72-C
GACTGGGTCCGCCAGKCTCCAGRGAAGGGGCTTGAGTGGGTTGSTGAAAT
TAGAAACAAAGCCAAT
3′ VH72-D
TTTGGAATCATCTCTTGAGATGGTGAACCTCCCTTTCACAGACTCATCAT
AATATGTTGCATGATTATTGGCTTTGTTTCT
5′ VH72-E
AGAGATGATTCCAAAARTAGMSTGTACCTGCAAATGAWMAGCTTAARARC
TGAAGACACTGSCSTTTATTACTGTACTGGG
3′ VH72-F-BstEII
GACCGTGGTGACCAGAGTCCCCTGGCCCCAGTTAGCAAACTCCCCAGTAC
AGTAATA
For VH3 3-73 the oligonucleotides were as follows:
5′ VH73-A-XhoI
CAAGTTCAGCTGCTCGAGTCTGGAGGAGGCTTGGTGCAACCTGGAGGATC
C
3′ VH73-B
CCAGTTCATCCAGTAGTTACTGAAAGTGAATCCAGAGGCARCACAGGAGA
GTTTCAKGGATCCTCCAGGTTG
5′ VH73-C
TACTGGATGAACTGGGTCCGCCAGKCTYCAGRGAAGGGGCTTGAGTGGGT
TGSTGAAATTAGATTGAAATCTAAT
3′ VH73-D
TTTGGAATCATCTCTTGAGATGGTGAACCTCCCTTTCACAGACTCCGCAT
AATGTGTTGCATAATTATTAGATTTCAATCT
5′ VH73-E
AGAGATGATTCCAAAARTASTGYCTACCTGCAAATGAACARCTTAARARC
TGAAGACACTGSCRTTTATTACTGTACGGGA
3′ VH73-F-BstEII
GACCGTGGTGACCGTGGTCCCTTGGCCCCAGTAAGCAAATTGTCCCACTC
CCGTACAGTAATA

[0814] Each of these primer sets spans over the whole corresponding VH sequence.

[0815] Within each set primers were mixed in equal amounts (e.g. 1 μl of each primer (primer stocks 20 to 100 μM) to a 20 μl PCR reaction) and added to a PCR mix consisting of PCR buffer, nucleotides and Taq polymerase. This mix was incubated at 94° C. for 3 minutes, 65° C. for 1 minute, 62° C. for 1 minute, 59° C. for 1 minute, 56° C. for 1 minute, 52° C. for 1 minute, 50° C. for 1 minute and at 72° C. for 10 minutes in a PCR cycler. Subsequently the product was run in an agarose gel electrophoresis and the product of a size from 200 to 400 isolated from the gel according to standard methods.

[0816] Each VH PCR product was then used as a template for a standard PCR reaction using primers that incorporate N-terminal and C-terminal suitable cloning restriction sites. The DNA fragment of the correct size (for a VH approximately 350 nucleotides) was isolated by agarose gel electrophoresis according to standard methods. In this way sufficient VH DNA fragment was amplified.

[0817] The human antibody germline VL sequence VkII A18 (http://vbase.mrc-cpe.cam.ac.uk/) was chosen as framework context for CDRL1 (SEQ ID 1489), CDRL2 (SEQ ID 1490) and CDRL3 (SEQ ID 1491). Likewise human antibody germline VL sequence VL7 7a (http://vbase.mrc-cpe.cam.ac.uk/) was chosen as framework context for CDRL1 (SEQ ID 1495), CDRL2 (SEQ ID 1496) and CDRL3 (SEQ ID 1497). For each human VL several degenerated oligonucleotides had to be synthesized that overlap in a terminal stretch of approximately 15-20 nucleotides. To this end every second primer was an antisense primer. Restriction sites needed for later cloning within the oligonucleotides were deleted. For VkII A18 the following oligonucleotides were used:

5′ Vk2A18-A-SacI
CCTGATGAGCTCGTGATGACCCAAACTCCACTCTCCCTGYCTGTCASTCY
TGGASAKCMAGCTTCCATCTCTTGC
3′ Vk2A18-B
CCAATATAAATAGGTGTTTCCATTGTTGTGTACCAGGTTCTGACTAGATC
TGCAAGAGATGGAAGC
5′ Vk2A18-C
ACCTATTTATATTGGTWCCTGCAGAAGYCAGGCCAGTCTCCAMAGCTCCT
GATTTATAGGGCTTCCATC
3′ Vk2A18-D
CTTGAGTGTGAAATCTGTCYCTGATCCACTGCCACTGAACCTGTCTGGGA
CCCCAGAAAATCGGATGGAAGCCCTATA
5′ Vk2A18-E
ACAGATTTCACACTCAAGATCAGCAGAGTGGAGGCTGAGGATSTGGGAGT
TTATTWCTGCTTTCAAGGTACACAT
3′ Vk2A18-F-BsiWI/SpeI
CCCGATACTAGTCGTACGTTTGATTTCCAGCTTGGTGCCTTGACCGAACG
TCCACGGAACATGTGTACCTTGAAAGCA
For VL7 7a the oligonucleotides were as follows:
5′ Vlam7a-A-SacI
CCTGCAGAGCTCGTTGTGACTCAGGAAYCTKCACTCACCRYATCACCTGG
TGRAACAGTCACACTCACTTGT
3′ Vlam7a-B
CCAGTTGGCATAGTTACTTGTTGTAACAGCCCCAGTACTTGAGCGACAAG
TGAGTGTGACTGT
5′ Vlam7a-C
AACTATGCCAACTGGKTCCAASAAAAACCAGRTCAKKYAYYCMSTGSTCT
AATAKRTGGTACCAACAACCGA
3′ Vlam7a-D
GGTGAGGGCAGCCTTGYCTCCAAKCAGGGAGCCTGAGAATCTGGCAGGAR
YMCMTGGTGCTCGGTTGTTGGTACC
5′ Vlam7a-E
AAGGCTGCCCTCACCMTCWCAGGGGYACAGMCTGAGGATGAGGCARWATA
TTWCTGTGCTCTATGGTACAGC
3′ Vlam7a-F-BsiWI/SpeI
CCAGTAACTAGTCGTACGTAGGACAGTCAGTTTGGTTCCTCCACCGAACA
CCCAATGGTTGCTGTACCATAGAGCACA

[0818] Each of these primer sets spans over the whole corresponding VL sequence.

[0819] Within each set primers were mixed in equal amounts (e.g. 1 μl of each primer (primer stocks 20 to 100 μM) to a 20 μl PCR reaction) and added to a PCR mix consisting of PCR buffer, nucleotides and Taq polymerase. This mix was incubated at 94° C. for 3 minutes, 65° C. for 1 minute, 62° C. for 1 minute, 59° C. for 1 minute, 56° C. for 1 minute, 52° C. for 1 minute, 50° C. for 1 minute and at 72° C. for 10 minutes in a PCR cycler. Subsequently the product was run in an agarose gel electrophoresis and the product of a size from 200 to 400 isolated from the gel according to standard methods.

[0820] Each VL PCR product was then used as a template for a standard PCR reaction using primers that incorporate N-terminal and C-terminal suitable cloning restriction sites. The DNA fragment of the correct size (for a VL approximately 330 nucleotides) was isolated by agarose gel electrophoresis according to standard methods. In this way sufficient VL DNA fragment was amplified.

[0821] The final VH3 3-72-based VH PCR product (i.e. the repertoire of human/humanized VH) was then combined with the final VkII A18-based VL PCR product (i.e. the repertoire of human/humanized VL) and the final VH3 3-73-based VH PCR product (i.e. the repertoire of human/humanized VH) with the final VL7 7a-based VL PCR product (i.e. the repertoire of human/humanized VL) in the phage display vector pComb3H5Bhis to form two different libraries of functional scFvs from which—after display on filamentous phage—anti-Muc-1 binders were selected, screened, identified and confirmed as described as follows:

[0822] 450 ng of the light chain fragments (SacI-SpeI digested) were ligated with 1400 ng of the phagemid pComb3H5Bhis (SacI-SpeI digested; large fragment). The resulting combinatorial antibody library was then transformed into 300 ul of electrocompetent Escherichia coli XL1 Blue cells by electroporation (2.5 kV, 0.2 cm gap cuvette, 25 uFD, 200 Ohm, Biorad gene-pulser) resulting in a library size of more than 10⁷ independent clones. After one hour of phenotype expression, positive transformants were selected for carbenicilline resistance encoded by the pComb3H5BHis vector in 100 ml of liquid super broth (SB)-culture over night. Cells were then harvested by centrifugation and plasmid preparation was carried out using a commercially available plasmid preparation kit (Qiagen).

[0823] 2800 ng of this plasmid-DNA containing the VL-library (XhoI-BstEII digested; large fragment) were ligated with 900 ng of the heavy chain V-fragments (XhoI-BstEII digested) and again transformed into two 300 ul aliquots of electrocompetent E. coli XL1 Blue cells by electroporation (2.5 kV, 0.2 cm gap cuvette, 25 uFD, 200 Ohm) resulting in a total VH-VL scFv (single chain variable fragment) library size of more than 10⁷ independent clones.

[0824] After phenotype expression and slow adaptation to carbenicillin, the E. coli cells containing the antibody library were transferred into SB-Carbenicillin (50 ug/mL) selection medium. The E. coli cells containing the antibody library was then infected with an infectious dose of 10¹² particles of helper phage VCSM13 resulting in the production and secretion of filamentous M13 phage, wherein phage particle contains single stranded pComb3H5BHis-DNA encoding a scFv-fragment and displayed the corresponding scFv-protein as a translational fusion to phage coat protein III. This pool of phages displaying the antibody library was used for the selection of antigen binding entities.

[0825] Generation of CHO Cells Expressing Human MUC-1

[0826] The coding sequence of human MUC-1 as published in GenBank (Accession number J05581) was obtained by gene synthesis according to standard protocols. The gene synthesis fragment was designed as to contain first a Kozak site for eukaryotic expression of the construct, followed by the coding sequence of the human MUC-1 protein and a stop codon (the cDNA and amino acid sequence of the construct is listed under SEQ ID NOs 1498 and 1499). In the gene synthesis fragment the internal repeat sequence (nucleotides 382 to 441) of MUC-1, which is contained only once in the version deposited in GenBank is contained sixteen times reflecting the multiple repeats in physiologically expressed MUC-1. The gene synthesis fragment was also designed as to introduce restriction sites at the beginning and at the end of the fragment. The introduced restriction sites, EcoRI at the 5′ end and SalI at the 3′ end, were utilised in the following cloning procedures. Internal XmaI restriction sites were removed by silent mutation of the coding sequence in the gene synthesis fragment (nucleotide 441 from C to T; this is the last nucleotide of the first repeat and therefore mutated identically in the 15 subsequent repeat sequences; and nucleotide 2160 from G to C). The gene synthesis fragment was cloned via EcoRI and SalI into a plasmid designated pEF-DHFR (pEF-DHFR is described in Raum et al. Cancer Immunol Immunother 50 (2001) 141-150) following standard protocols. The afore-mentioned procedures were carried out according to standard protocols (Sambrook, Molecular Cloning; A Laboratory Manual, 3rd edition, Cold Spring Harbour Laboratory Press, Cold Spring Harbour, N.Y. (2001)). A clone with sequence-verified nucleotide sequence was transfected into DHFR deficient CHO cells for eukaryotic expression of the construct. Eukaryotic protein expression in DHFR deficient CHO cells was performed as described by Kaufmann R. J. (1990) Methods Enzymol. 185, 537-566. Gene amplification of the construct was induced by increasing concentrations of methotrexate (MTX) to a final concentration of up to 20 nM MTX.

[0827] For the selection of antigen binding entities the phage library carrying the cloned scFv-repertoire was harvested from the respective culture supernatant by PEG8000/NaCl precipitation and centrifugation. Approximately 1011 to 1012 scFv phage particles were resuspended in 0.4 ml of PBS/0.1% BSA and incubated with 105 to 107 Muc-1 transfected CHO cells (see example Muc-1 RoK) for 1 hour on ice under slow agitation. These Muc-1 transfected CHO cells were harvested beforehand by centrifugation, washed in PBS and resuspended in PBS/1% FCS (containing Na Azide). scFv phage which do not specifically bind to the Muc-1 transfected CHO cells were eliminated by up to five washing steps with PBS/1% FCS (containing Na Azide). After washing, binding entities were eluted from the cells by resuspending the cells in HCl-glycine pH 2.2 (10 min incubation with subsequent vortexing) and after neutralization with 2 M Tris pH 12, the eluate was used for infection of a fresh uninfected E. coli XL1 Blue culture (OD600>0.5). The E. coli culture containing E. coli cells successfully transduced with a phagemid copy, encoding a human/humanized scFv-fragment, were again selected for carbenicillin resistance and subsequently infected with VCMS 13 helper phage to start the second round of antibody display and in vitro selection. A total of 4 to 5 rounds of selections were carried out, normally.

[0828] In order to screen for Muc-1 specific binders plasmid DNA corresponding to 4 and 5 rounds of panning was isolated from E. coli cultures after selection. For the production of soluble scFv-protein, VH-VL-DNA fragments were excised from the plasmids (XhoI-SpeI). These fragments were cloned via the same restriction sites into the plasmid pComb3H5BFlag/His differing from the original pComb3H5BHis in that the expression construct (e.g. scFv) includes a Flag-tag (DYKDDDDK) between the scFv and the His6-tag and the additional phage proteins were deleted. After ligation, each pool (different rounds of panning) of plasmid DNA was transformed into 100 μl heat shock competent E. coli TG1 or XLI blue and plated onto carbenicillin LB-agar. Single colonies were picked into 100 ul of LB carb (50 ug/ml).

[0829] E. coli transformed with pComb3H5BHis containing a VL-and VH-segment produce soluble scFv in sufficient amounts after excision of the gene III fragment and induction with 1 mM IPTG. Due to a suitable signal sequence, the scFv-chain was exported into the periplasma where it folds into a functional conformation.

[0830] Single E. coli TG1 bacterial colonies from the transformation plates were picked for periplasmic small scale preparations and grown in SB-medium (e.g. 10 ml) supplemented with 20 mM MgCl₂ and carbenicillin 50 μg/m1 (and re-dissolved in PBS (e.g. 1 ml) after harvesting. By four rounds of freezing at −70° C. and thawing at 37° C., the outer membrane of the bacteria was destroyed by temperature shock and the soluble periplasmic proteins including the scFvs were released into the supernatant. After elimination of intact cells and cell-debris by centrifugation, the supernatant containing the anti-Muc-1 scFvs was collected and used for the identification of Muc-1 specific binders as follows:

[0831] Binding of scFvs to Muc-1 was tested by flow cytometry on Muc-1 transfected CHO cells; untransfected CHO cell were use as negative control.

[0832] For flow cytometry 2.5×10⁵ cells were incubated with 50 ul of scFv periplasmic preparation or with 5 μg/ml of purified scFv in 50 μl PBS with 2% FCS. The binding of scFv was detected with an anti-His antibody (Penta-His Antibody, BSA free, Qiagen GmbH, Hilden, FRG) at 2 μg/ml in 50 μl PBS with 2% FCS. As a second step reagent a R-Phycoerythrin-conjugated affinity purified F(ab′)2 fragment, goat anti-mouse IgG (Fc-gamma fragment specific), diluted 1:100 in 50 μl PBS with 2% FCS (Dianova, Hamburg, FRG) is used. The samples were measured on a FACSscan (BD biosciences, Heidelberg, FRG).

[0833] Single clones were then analyzed for favourable properties and amino acid sequence. Muc-1 specific scFvs were converted into recombinant bispecific single chain antibodies by joining them via a Gly₄Ser₁-linker with the CD3 specific scFv I2C (SEQ ID 185) or any other CD3 specific scFv of the invention to result in constructs with the domain arrangement VH_{Muc1}-(Gly₄Ser₁)₃-VL_{Muc1}-Gly₄Ser₁-VH_{CD3}-(Gly₄Ser₁)₃-VL_{CD3} or alternative domain arrangements. For expression in CHO cells the coding sequences of (i) an N-terminal immunoglobulin heavy chain leader comprising a start codon embedded within a Kozak consensus sequence and (ii) a C-terminal His₆-tag followed by a stop codon were both attached in frame to the nucleotide sequence encoding the bispecific single chain antibodies prior to insertion of the resulting DNA-fragment as obtained by gene synthesis into the multiple cloning site of the expression vector pEF-DHFR (Raum et al. Cancer Immunol Immunother 50 (2001) 141-150). Stable transfection of DHFR-deficient CHO cells, selection for DHFR-positive transfectants secreting the bispecific single chain antibodies into the culture supernatant and gene amplification with methotrexat for increasing expression levels were carried out as described (Mack et al. Proc. Natl. Acad. Sci. USA 92 (1995) 7021-7025). All other state of the art procedures were carried out according to standard protocols (Sambrook, Molecular Cloning; A Laboratory Manual, 3rd edition, Cold Spring Harbour Laboratory Press, Cold Spring Harbour, N.Y. (2001)).

[0834] Identification of functional bispecific single-chain antibody constructs was carried out by flowcytometric analysis of culture supernatant from transfected CHO cells. For this purpose CD3 binding was tested on the human CD3 positive T cell leukemia cell line HPB-ALL (DSMZ, Braunschweig, ACC483) and on the macaque T cell line 4119LnPx. Binding to tumor specific Muc-1 epitopes was tested on Muc-1 transfected CHO cells. 200.000 cells of the respective cell line were incubated for 30 min. on ice with 50 μl of cell culture supernatant. The cells were washed twice in PBS with 2% FCS and bound bispecific single-chain antibody construct was detected with a murine anti-His antibody (Penta His antibody; Qiagen; diluted 1:20 in 50 μl PBS with 2% FCS). After washing, bound anti-His antibodies were detected with an Fc gamma-specific antibody (Dianova) conjugated to phycoerythrin, diluted 1:100 in PBS with 2% FCS. Supernatant of untransfected CHO cells was used as negative control.

[0835] Flow cytometry was performed on a FACS-Calibur apparatus; the CellQuest software was used to acquire and analyze the data (Becton Dickinson biosciences, Heidelberg). FACS staining and measuring of the fluorescence intensity were performed as described in Current Protocols in Immunology (Coligan, Kruisbeek, Margulies, Shevach and Strober, Wiley-Interscience, 2002).

[0836] Only those constructs showing bispecific binding to human and macaque CD3 as well as to tumor specific epitopes of Muc-1 were selected for further use.

[0837] For protein production CHO cells expressing fully functional bispecific single chain antibody and adapted to nucleoside-free HyQ PF CHO liquid soy medium (with 4.0 mM L-Glutamine with 0.1% Pluronic F-68; HyClone) were grown in roller bottles with nucleoside-free HyQ PF CHO liquid soy medium (with 4.0 mM L-Glutamine with 0.1% Pluronic F-68; HyClone) for 7 days. Culture supernatant was cleared from cells by centrifugation and stored at −20° C. until purification. As chromatography equipment for purification of bispecific single chain antibody from culture supernatant Äkta® Explorer System (GE Health Systems) and Unicorn® Software were used.

[0838] Immobilized metal affinity chromatography (“IMAC”) was performed using a Fractogel EMD chelate® (Merck) which was loaded with ZnCl₂ according to the protocol provided by the manufacturer. The column was equilibrated with buffer A (20 mM sodium phosphate buffer pH 7.2, 0.1 M NaCl) and the cell culture supernatant (500 ml) was applied to the column (10 ml) at a flow rate of 3 ml/min. The column was washed with buffer A to remove unbound sample. Bound protein was eluted using a two step gradient of buffer B (20 mM sodium phosphate buffer pH 7.2, 0.1 M NaCl, 0.5 M Imidazole) according to the following:

[0839] Step 1: 20% buffer B in 6 column volumes

[0840] Step 2: 100% buffer B in 6 column volumes

[0841] Eluted protein fractions from step 2 were pooled for further purification. All chemicals were of research grade and purchased from Sigma (Deisenhofen) or Merck (Darmstadt).

[0842] Gel filtration chromatography was performed on a HiLoad 16/60 Superdex 200 prep grade column (GE/Amersham) equilibrated with Equi-buffer (25 mM Citrate, 200 mM Lysine, 5% Glycerol, pH 7.2). Eluted protein samples (flow rate 1 ml/min) were subjected to standard SDS-PAGE and Western Blot for detection. Prior to purification, the column was calibrated for molecular weight determination (molecular weight marker kit, Sigma MW GF-200). Protein concentrations were determined using OD280 nm.

[0843] Purified bispecific single chain antibody protein was analyzed in SDS PAGE under reducing conditions performed with pre-cast 4-12% Bis Tris gels (Invitrogen). Sample preparation and application were performed according to the protocol provided by the manufacturer. The molecular weight was determined with MultiMark protein standard (Invitrogen). The gel was stained with colloidal Coomassie (Invitrogen protocol). The purity of the isolated protein is >95% as determined by SDS-PAGE.

[0844] The bispecific single chain antibody has a molecular weight of about 52 kDa under native conditions as determined by gel filtration in PBS. All constructs were purified according to this method.

[0845] Western Blot was performed using an Optitran® BA-S83 membrane and the Invitrogen Blot Module according to the protocol provided by the manufacturer. For detection of the bispecific single chain antibody protein antibodies an anti-His Tag antibody was used (Penta His, Qiagen). A Goat-anti-mouse Ig antibody labeled with alkaline phosphatase (AP) (Sigma) was used as secondary antibody and BCIP/NBT (Sigma) as substrate. A single band was detected at 52 kD corresponding to the purified bispecific single chain antibody.

[0846] The potency in the human and the non-chimpanzee primate system of bispecific single chain antibodies interacting with human and macaque CD3 and with tumor specific epitopes of Muc-1 was determined by a cytotoxicity assay based on chromium 51 (⁵¹Cr) release using Muc-1 transfected CHO cells as target cells and stimulated human CD4/CD56 depleted PBMC or the macaque T cell line 4119LnPx as effector cells.

[0847] Generation of stimulated human PBMC was performed as follows:

[0848] A Petri dish (145 mm diameter, Nunc) was coated with a commercially available anti-CD3 specific antibody (e.g. OKT3, Othoclone) in a final concentration of 1 μg/ml for 1 hour at 37° C. Unbound protein was removed by one washing step with PBS. The fresh PBMC were isolated from peripheral blood (30-50 ml human blood) by FicoII gradient centrifugation according to standard protocols. 3-5×10⁷ PBMC were added to the precoated petri dish in 120 ml of RPMI 1640 with stabilized glutamine/10% FCS/IL-2 20 U/ml (Proleukin, Chiron) and stimulated for 2 days. On the third day the cells were collected and washed once with RPMI 1640. IL-2 was added to a final concentration of 20 U/ml and the cells were cultivated again for one day in the same cell culture medium as above.

[0849] Target cells were washed twice with PBS and labelled with 11.1 MBq ⁵¹Cr in a final volume of 100 μl RPMI with 50% FCS for 45 minutes at 37° C. Subsequently the labelled target cells were washed 3 times with 5 ml RPMI and then used in the cytotoxicity assay. The assay was performed in a 96 well plate in a total volume of 250 μl supplemented RPMI (as above) with an E:T ratio of 10:1. 1 μg/ml of the cross-species specific bispecific single chain antibody molecules and 20 threefold dilutions thereof were applied. The assay time was 18 hours and cytotoxicity was measured as relative values of released chromium in the supernatant related to the difference of maximum lysis (addition of Triton-X) and spontaneous lysis (without effector cells). All measurements were done in quadruplicates. Measurement of chromium activity in the supernatants was performed with a Wizard 3″ gamma counter (Perkin Elmer Life Sciences GmbH, Köln, Germany). Analysis of the experimental data was performed with Prism 4 for Windows (version 4.02, GraphPad Software Inc., San Diego, Calif., USA). Sigmoidal dose response curves typically have R² values >0.90 as determined by the software. EC₅₀ values as measure of potency were calculated by the analysis program.

[0850] 36. Generation of CD33 and CD3 Cross-Species Specific Bispecific Single Chain Molecules

[0851] 36.1 Generation of CD33 and CD3 Cross-Species Specific Bispecific Single Chain Molecules

[0852] Generally, bispecific single chain antibody molecules, each comprising a domain with a binding specificity cross-species specific for human and macaque CD3epsilon as well as a domain with a binding specificity cross-species specific for human and macaque CD33, were designed as set out in the following Table 14:

TABLE 14
Formats of anti-CD3 and anti-CD33 cross-species specific
bispecific single chain antibody molecules

| SEQ ID | Formats of protein constructs |
|---|---|
| (nucl/prot) | (N → C) |
| 1341/1340 | I2CHL × AF5HL |
| 1339/1338 | F12QHL × AF5HL |
| 1337/1336 | H2CHL × AF5HL |

[0853] The aforementioned constructs containing the variable light-chain (L) and variable heavy-chain (H) domains cross-species specific for human and macaque CD33 and the CD3 specific VH and VL combinations cross-species specific for human and macaque CD3 were obtained by gene synthesis. The gene synthesis fragments were designed as to contain first a Kozak site for eukaryotic expression of the construct, followed by a 19 amino acid immunoglobulin leader peptide, followed in frame by the coding sequence of the respective bispecific single chain antibody molecule, followed in frame by the coding sequence of a histidineₛ-tag and a stop codon. The gene synthesis fragment was also designed as to introduce suitable restriction sites at the beginning and at the end of the fragment. The introduced restriction sites were utilised in the following cloning procedures. The gene synthesis fragment was cloned via these restriction sites into a plasmid designated pEF-DHFR (pEF-DHFR is described in Raum et al. Cancer Immunol Immunother 50 (2001) 141-150) following standard protocols. The aforementioned procedures were carried out according to standard protocols (Sambrook, Molecular Cloning; A Laboratory Manual, 3rd edition,

[0854] Cold Spring Harbour Laboratory Press, Cold Spring Harbour, N.Y. (2001)). A clone with sequence-verified nucleotide sequence was transfected into DHFR deficient CHO cells for eukaryotic expression of the construct. Eukaryotic protein expression in DHFR deficient CHO cells was performed as described by Kaufmann R. J. (1990) Methods Enzymol. 185, 537-566. Gene amplification of the construct was induced by increasing concentrations of methotrexate (MTX) to a final concentration of up to 20 nM MTX. After two passages of stationary culture cell culture supernatant was collected and used in the subsequent experiments.

[0855] 36.2 Flow Cytometric Binding Analysis of the CD33 and CD3 Cross-Species Specific Bispecific Antibodies

[0856] In order to test the functionality of the cross-species specific bispecific antibody constructs regarding the capability to bind to human and macaque CD33 and CD3, respectively, a FACS analysis is performed. For this purpose CHO cells transfected with human CD33 as described in Example 23.1 and the human CD3 positive T cell leukemia cell line HPB-ALL (DSMZ, Braunschweig, ACC483) were used to test the binding to human antigens. The binding reactivity to macaque antigens was tested by using the generated macaque CD33 transfectant described in Example 23.2 and macaque PBMC (preparation of macaque PBMC was performed by FicoII gradient centrifugation of peripheral blood from macaque monkeys according to standard protocols). 200000 cells of the respective cell lines or PBMC were incubated for 30 min. on ice with 50 μl of cell culture supernatant of transfected cells expressing the cross-species specific bispecific antibody constructs. The cells were washed twice in PBS with 2% FCS and binding of the construct was detected with a murine anti-His antibody (Penta His antibody; Qiagen; diluted 1:20 in 50 μl PBS with 2% FCS). After washing, bound anti-His antibodies were detected with an Fc gamma-specific antibody (Dianova) conjugated to phycoerythrin, diluted 1:100 in PBS with 2% FCS. Supernatant of untransfected CHO cells was used as negative control.

[0857] Flow cytometry was performed on a FACS-Calibur apparatus; the CellQuest software was used to acquire and analyze the data (Becton Dickinson biosciences,

[0858] Heidelberg). FACS staining and measuring of the fluorescence intensity were performed as described in Current Protocols in Immunology (Coligan, Kruisbeek, Margulies, Shevach and Strober, Wiley-Interscience, 2002).

[0859] The bispecific binding of the single chain molecules listed above, which were cross-species specific for CD33 and cross-species specific for human and non-chimpanzee primate CD3 was clearly detectable as shown in FIG. 60. In the FACS analysis all constructs showed binding to CD3 and CD33 as compared to the respective negative controls. Cross-species specificity of the bispecific antibodies to human and macaque CD3 and CD33 antigens was demonstrated.

[0860] 36.3. Bioactivity of CD33 and CD3 Cross-Species Specific Bispecific Single Chain Antibodies

[0861] Bioactivity of the generated bispecific single chain antibodies was analyzed by chromium 51 (⁵¹Cr) release in vitro cytotoxicity assays using the CD33 positive cell lines described in Examples 23.1 and 23.2. As effector cells stimulated human CD4/CD56 depleted PBMC or the macaque T cell line 4119LnPx were used as specified in the respective figures.

[0862] A Petri dish (145 mm diameter, Greiner bio-one GmbH, Kremsmünster) was coated with a commercially available anti-CD3 specific antibody (e.g. OKT3, Orthoclone) in a final concentration of 1 μg/ml for 1 hour at 37° C. Unbound protein was removed by one washing step with PBS. The fresh PBMC were isolated from peripheral blood (30-50 ml human blood) by FicoII gradient centrifugation according to standard protocols. 3-5×10⁷ PBMC were added to the precoated Petri dish in 120 ml of

[0863] RPMI 1640 with stabilized glutamine/10% FCS/IL-2 20 U/ml (Proleukin, Chiron) and stimulated for 2 days. On the third day the cells were collected and washed once with RPMI 1640. IL-2 is added to a final concentration of 20 U/ml and the cells were cultivated again for one day in the same cell culture medium as above.

[0864] By depletion of CD4+ T cells and CD56+ NK cells according to standard protocols CD8+ cytotoxic T lymphocytes (CTLs) were enriched.

[0865] Target cells were washed twice with PBS and labelled with 11.1 MBq ⁵¹Cr in a final volume of 100 μl RPMI with 50% FCS for 45 minutes at 37° C. Subsequently the labelled target cells were washed 3 times with 5 ml RPMI and then used in the cytotoxicity assay. The assay was performed in a 96 well plate in a total volume of 250 μl supplemented RPMI (as above) with an E:T ratio of 10:1. Supernatant of cells expressing the cross-species specific bispecific single chain antibody molecules in a final concentration of 50% and 20 threefold dilutions thereof were applied. The assay time is 18 hours and cytotoxicity was measured as relative values of released chromium in the supernatant related to the difference of maximum lysis (addition of Triton-X) and spontaneous lysis (without effector cells). All measurements were done in quadruplicates. Measurement of chromium activity in the supernatants was performed with a Wizard 3″ gamma counter (Perkin Elmer Life Sciences GmbH, Köln, Germany). Analysis of the experimental data was performed with Prism 4 for Windows (version 4.02, GraphPad Software Inc., San Diego, Calif., USA). Sigmoidal dose response curves typically have R² values >0.90 as determined by the software. EC₅₀ values calculated by the analysis program were used for comparison of bioactivity.

[0866] As shown in FIG. 61, all of the generated cross-species specific bispecific single chain antibody constructs demonstrate cytotoxic activity against human CD33 positive target cells elicited by stimulated human CD4/CD56 depleted PBMC and against macaque CD33 positive target cells elicited by the macaque T cell line 4119LnPx.

[0867] 37. Redistribution of Circulating Chimpanzee T Cells Upon Exposure to a Conventional Bispecific CD3 binding Molecule Directed at a Target Molecule which is Absent from Circulating Blood Cells

[0868] A single male chimpanzee was subjected to dose escalation with intravenous single-chain EpCAM/CD3-bispecific antibody construct (Schlereth (2005) Cancer Res 65: 2882). Like in the conventional single-chain CD19/CD3-bispecific antibody construct (Loffler (2000, Blood, Volume 95, Number 6) or WO 99/54440), the CD3 arm of said EpCAM/CD3-construct is also directed against a conventional context dependent epitope of human and chimpanzee CD3. At day 0, the animal received 50m1 PBS/5% HSA without test material, followed by 50 ml PBS/5% HSA plus single-chain EpCAM/CD3-bispecific antibody construct at 1.6, 2.0, 3.0 and 4.5 pg/kg on days 7, 14, 21 and 28, respectively. The infusion period was 2 hours per administration. For each weekly infusion the chimpanzee was sedated with 2-3 mg/kg Telazol intramuscularly, intubated and placed on isoflurane/O₂ anesthesia with stable mean blood pressures. A second intravenous catheter was placed in an opposite limb to collect (heparinized) whole blood samples at the time points indicated in FIG. 62 for FACS analysis of circulating blood cells. After standard erythrocyte lysis, T cells were stained with a FITC-labeled antibody reacting with chimpanzee CD2 (Becton Dickinson) and the percentage of T cells per total lymphocytes determined by flowcytometry. As shown in FIG. 62, every administration of single-chain EpCAM/CD3-bispecific antibody construct induced a rapid drop of circulating T cells as observed with single-chain CD19/CD3-bispecific antibody construct in B-NHL patients, who had essentially no circulating target B (lymphoma) cells. As there are no EpCAM-positive target cells in the circulating blood of humans and chimpanzees, the drop of circulating T cells upon exposure to the single-chain EpCAM/CD3-bispecific antibody construct can be attributed solely to a signal, which the T cells receive through pure interaction of the CD3 arm of the construct with a conventional context dependent CD3 epitope in the absence of any target cell mediated crosslinking. Like the redistribution of T cells induced through their exposure to single-chain CD19/CD3-bispecific antibody construct in B-NHL patients, who had essentially no circulating target B (lymphoma) cells, the T cell redistribution in the chimpanzee upon exposure to the single-chain EpCAM/CD3-bispecific antibody construct can be explained by a conformational change of CD3 following the binding event to a context dependent CD3 epitope further resulting in the transient increase of T cell adhesiveness to blood vessel endothelium (see Example 20). This finding confirms, that conventional CD3 binding molecules directed to context dependent CD3 epitopes—solely through this interaction—can lead to a redistribution pattern of peripheral blood T cells, which is associated with the risk of CNS adverse events in humans as describe in Example 20.

[0869] 38. Specific Binding of scFv Clones to the N-terminus of Human CD3 Epsilon

[0870] 38.1 Bacterial Expression of scFv Constructs in E. coli XL1 Blue

[0871] As previously mentioned, E. coli XL1 Blue transformed with pComb3H5Bhis/Flag containing a VL- and VH-segment produce soluble scFv in sufficient amounts after excision of the gene III fragment and induction with 1 mM IPTG. The scFv-chain is exported into the periplasma where it folds into a functional conformation.

[0872] The following scFv clones were chosen for this experiment:

[0873] i) ScFvs 4-10, 3-106, 3-114, 3-148, 4-48, 3-190 and 3-271 as described in WO 2004/106380.

[0874] ii) ScFvs from the human anti-CD3epsilon binding clones H2C, F12Q and l2C as described herein.

[0875] For periplasmic preparations, bacterial cells transformed with the respective scFv containing plasmids allowing for periplasmic expression were grown in SB-medium supplemented with 20 mM MgCl₂ and carbenicillin 50 μg/ml and redissolved in PBS after harvesting. By four rounds of freezing at −70° C. and thawing at 37° C., the outer membrane of the bacteria was destroyed by osmotic shock and the soluble periplasmic proteins including the scFvs were released into the supernatant. After elimination of intact cells and cell-debris by centrifugation, the supernatant containing the human anti-human CD3-scFvs was collected and used for further examination. These crude supernatants containing scFv will be further termed periplasmic preparations (PPP).

[0876] 38.2 Binding of scFvs to Human CD3 Epsilon (aa 1-27)- Fc Fusion Protein

[0877] ELISA experiments were carried out by coating the human CD3 epsilon (aa 1-27)-Fc fusion protein to the wells of 96 well plastic plates (Nunc, maxisorb) typically at 4° C. over night. The antigen coating solution was then removed, wells washed once with PBS/0.05% Tween 20 and subsequently blocked with PBS/3% BSA for at least one hour. After removal of the blocking solution, PPPs and control solutions were added to the wells and incubated for typically one hour at room temperature. The wells were then washed three times with PBS/0.05% Tween 20. Detection of scFvs bound to immobilized antigen was carried out using a Biotin-labeled anti FLAG-tag antibody (M2 anti Flag-Bio, Sigma, typically at a final concentration of 1 μg/ml PBS) and detected with a peroxidase-labeled Streptavidine (Dianova, 1 μg/ml PBS). The signal was developed by adding ABTS substrate solution and measured at a wavelength of 405 nm. Unspecific binding of the test-samples to the blocking agent and/or the human IgG1 portion of the human CD3 epsilon (aa 1-27)-Fc fusion protein was examined by carrying out the identical assay with the identical reagents and identical timing on ELISA plates which were coated with human IgG1 (Sigma). PBS was used as a negative control.

[0878] As shown in FIG. 63, scFvs H2C, F12Q and I2C show strong binding signals on human CD3 epsilon (aa 1-27)-Fc fusion protein. The human scFvs 3-106, 3-114, 3-148, 3-190, 3-271, 4-10 and 4-48 (as described in WO 2004/106380) do not show any significant binding above negative control level.

[0879] To exclude the possibility that the positive binding of scFvs H2C, F12Q and I2C to wells coated with human CD3 epsilon (aa 1-27)-Fc fusion protein might be due to binding to BSA (used as a blocking agent) and/or the human IgG1 Fc-gamma-portion of the human CD3 epsilon (aa 1-27)-Fc fusion protein, a second ELISA experiment was performed in parallel. In this second ELISA experiment, all parameters were identical to those in the first ELISA experiment, except that in the second ELISA experiment human IgG1 (Sigma) was coated instead of human CD3 epsilon (aa 1-27)-Fc fusion protein. As shown in FIG. 64, none of the scFvs tested showed any significant binding to BSA and/or human IgG1 above background level.

[0880] Taken together, these results allow the conclusion that conventional CD3 binding molecules recognizing a context-dependent epitope of CD3 epsilon (e.g. as disclosed in WO 2004/106380) do not bind specifically to the human CD3 epsilon (aa 1-27)-region, whereas the scFvs H2C, F12Q and I2C binding a context-independent epitope of CD3 epsilon clearly show specific binding to the N-terminal 27 amino acids of human CD3 epsilon.

[0881] 39. Generation of CD44 and CD3 Cross-Species Specific Bispecific Single Chain Molecules

[0882] 39.1 Cloning of Cross-Species Specific Binding Molecules

[0883] Generally, bispecific single chain antibody molecules, each comprising a domain with a binding specificity cross-species specific for human and macaque CD3 epsilon as well as a domain with a binding specificity cross-species specific for human and macaque CD44, are designed as set out in the following table 15.

TABLE 15
Formats of anti-CD3 and anti-CD44 cross-species specific
bispecific single chain antibody molecules

| SEQ ID | Formats of protein constructs |
|---|---|
| (nucl/prot) | (N → C) |
| 1589/1588 | CD44-A8 LH × I2C HL |
| 1603/1602 | CD44-C2 HL × I2C HL |
| 1631/1630 | CD44-H3 HL × I2C HL |
| 1617/1616 | CD44-F6 HL × I2C HL |

[0884] The aforementioned constructs containing the variable heavy-chain (VH) and variable light-chain (VL) domains cross-species specific for human and macaque CD44 and the VH and VL domains cross-species specific for human and macaque CD3 were obtained by gene synthesis. The gene synthesis fragments were designed as to contain first a Kozak site for eukaryotic expression of the construct, followed by a 19 amino acid immunoglobulin leader peptide, followed in frame by the coding sequence of the respective bispecific single chain antibody molecule, followed in frame by the coding sequence of a histidine₆-tag and a stop codon. The gene synthesis fragment was also designed as to introduce suitable N- and C-terminal restriction sites. The gene synthesis fragment was cloned via these restriction sites into a plasmid designated pEF-DHFR (pEF-DHFR is described in Raum et al. Cancer Immunol Immunother 50 (2001) 141-150) according to standard protocols (Sambrook, Molecular Cloning; A Laboratory Manual, 3rd edition, Cold Spring Harbour Laboratory Press, Cold Spring Harbour, N.Y. (2001)). A clone with sequence-verified nucleotide sequence was transfected into dihydrofolate reductase (DHFR) deficient Chinese hamster ovary (CHO) cells for eukaryotic expression of the construct.

[0885] 39.2 Expression of the Bispecific Single Chain Antibody Molecules

[0886] The bispecific constructs were transiently expressed in DHFR deficient CHO cells. In brief, 4×10⁵ cells per construct were cultivated in 3 ml RPMI 1640 all medium with stabilized glutamine supplemented with 10% fetal calf serum, 1% penicillin/streptomycin and nucleosides from a stock solution of cell culture grade reagents (Sigma-Aldrich Chemie GmbH, Taufkirchen, Germany) to a final concentration of 10 μg/ml Adenosine, 10 μg/ml Deoxyadenosine and 10 μg/ml Thymidine, in an incubator at 37° C., 95% humidity and 7% CO₂ one day before transfection. Transfection was performed with Fugene HD Transfection Reagent (Roche, # 04709691001) according to the manufacturer's protocol. 94 μl OptiMEM medium (Invitrogen) and 6 μl Fugene HD were mixed and incubated for 5 minutes at room temperature. Subsequently, 1.5 μg DNA per construct were added, mixed and incubated for 15 minutes at room temperature. Meanwhile, the DHFR deficient CHO cells were washed with 1× PBS and resuspended in 1.5 ml RPMI 1640 all medium. The transfection mix was diluted with 600 μl RPMI 1640 all medium, added to the cells and incubated overnight at 37° C., 95% humidity and 7% CO₂. The day after transfection the incubation volume of each approach was extended to 5 ml RPMI 1640 all medium. Supernatant was harvested after 3 days of incubation.

[0887] 39.3 Flow Cytometric Binding Analysis of the CD44 and CD3 Cross-Species Specific Bispecific Antibodies

[0888] In order to test the functionality of the cross-species specific bispecific antibody constructs regarding the capability to bind to human and macaque CD44 and CD3, respectively, a FACS analysis was performed. For this purpose CHO cells transfected with human CD44 (as described in Example 28.1) and the human CD3 positive T cell leukemia cell line HPB-ALL (DSMZ, Braunschweig, ACC483) were used to test the binding to human antigens. The binding reactivity to macaque antigens was tested by using the generated macaque CD44 transfectant (described in Example 28.3) and a macaque T cell line 4119LnPx (kindly provided by Prof. Fickenscher, Hygiene Institute, Virology, Erlangen-Nuernberg; published in Knappe A, et al., and Fickenscher H., Blood 2000, 95, 3256-61). To demonstrate the specificity of the cross-species specific bispecific antibody constructs to CD44, the binding to human CD44delv6 (CD44 deleted for the v6 exon) was tested using CHO cells transfected with human CD44delv6 (generation described in Example 28.2). 200.000 cells of the respective cell lines were incubated for 30 min on ice with 50 μl of the cell supernatants of transfected cells expressing the cross-species specific bispecific antibody constructs. The cells were washed twice in PBS with 2% FCS and binding of the construct was detected with a murine anti-His antibody (Penta His antibody; Qiagen; diluted 1:20 in 50 μl PBS with 2% FCS). After washing, bound anti-His antibodies were detected with an Fc gamma-specific antibody (Dianova) conjugated to phycoerythrin, diluted 1:100 in PBS with 2% FCS. Supernatant of untransfected CHO cells was used as negative control for binding to the T cell lines. A single chain construct with irrelevant target specificity was used as negative control for binding to the CD44 and the CD44delv6 transfected CHO cells.

[0889] Flow cytometry was performed on a FACS-Calibur apparatus; the CellQuest software was used to acquire and analyze the data (Becton Dickinson biosciences, Heidelberg). FACS staining and measuring of the fluorescence intensity were performed as described in Current Protocols in Immunology (Coligan, Kruisbeek, Margulies, Shevach and Strober, Wiley-Interscience, 2002).

[0890] The bispecific binding of the single chain molecules listed above, which are cross-species specific for CD44 and cross-species specific for human and macaque CD3 was clearly detectable as shown in FIG. 65a-d. No binding of the molecules to CD44delv6 was seen in FIG. 65e. Cross-species specificity of the bispecific antibodies to human and macaque CD3 and CD44 antigens was therefore clearly demonstrated.

[0891] 39.4 Bioactivity of CD44 and CD3 Cross-Species Specific Bispecific Single Chain Antibodies

[0892] Bioactivity of the generated bispecific single chain antibodies was analyzed by chromium 51 (⁵¹Cr) release in vitro cytotoxicity assays using the human CD44 positive cell line described in 28.1. As effector cells stimulated human CD4/CD56 depleted PBMC, stimulated human PBMC were used as specified in the respective figure.

[0893] Generation of the stimulated CD4/CD56 depleted PBMC was performed as follows:

[0894] Coating of a Petri dish (145 mm diameter, Greiner bio-one GmbH, Kremsmünster) was carried out with a commercially available anti-CD3 specific antibody (e.g. OKT3, Othoclone) in a final concentration of 1 μg/ml for 1 hour at 37° C. Unbound protein was removed by one washing step with PBS. The fresh PBMC were isolated from peripheral blood (30-50 ml human blood) by FicoII gradient centrifugation according to standard protocols. 3-5×10⁷ PBMC were added to the precoated petri dish in 120 ml of RPMI 1640 with stabilized glutamine/10% FCS/IL-2 20 U/ml (Proleukin, Chiron) and stimulated for 2 days. On the third day the cells were collected and washed once with RPMI 1640. IL-2 is added to a final concentration of 20 U/ml and the cells were cultivated again for one day in the same cell culture medium as above. By depletion of CD4+ T cells and CD56+ NK cells according to standard protocols CD8+cytotoxic T lymphocytes (CTLs) were enriched.

[0895] Target cells were washed twice with PBS and labelled with 11.1 MBq ⁵¹Cr in a final volume of 100 μl RPMI with 50% FCS for 45 minutes at 37° C. Subsequently the labelled target cells were washed 3 times with 5 ml RPMI and then used in the cytotoxicity assay. The assay was performed in a 96 well plate in a total volume of 250 μl supplemented RPMI (as above) with an E:T ratio 10:1. Cell supernatant containing the cross-species specific bispecific single chain antibody molecules and 20 twofold dilutions thereof were applied for the human cytotoxicity assay. The assay time was 18 hours and cytotoxicity was measured as relative values of released chromium in the supernatant related to the difference of maximum lysis (addition of Triton-X) and spontaneous lysis (without effector cells). All measurements were done in quadruplicates. Measurement of chromium activity in the supernatants was performed with a Wizard 3″ gamma counter (Perkin Elmer Life Sciences GmbH, Köln, Germany). Analysis of the experimental data was performed with Prism 4 for Windows (version 4.02, GraphPad Software Inc., San Diego, Calif., USA). Sigmoidal dose response curves typically have R² values >0.90 as determined by the software. EC₅₀ values calculated by the analysis program were used for comparison of bioactivity.

[0896] As shown in FIG. 66, all of the generated cross-species specific bispecific single chain antibody constructs demonstrated cytotoxic activity against CD44 positive target cells elicited by stimulated human CD4/CD56 depleted PBMC.

[0897] 40. Generation of an HCV Antigen and CD3 Cross-Species Specific Bispecific Tandem Single Chain Antibody Fragment

[0898] 40. 1. Generation of CHO Cells Expressing HCV Envelope Glycoprotein E2 (HCV Genotypes 1a and 1 b)

[0899] The coding sequences of hepatitis C virus (HCV) envelope glycoprotein E2 (HCV Genotype 1a and 1b, HCV isolates of the respective subtypes; sequences determined according to standard protocols) each as translational fusion proteins with the human CD4 transmembrane and intracellular domain were obtained by gene synthesis according to standard protocols. The gene synthesis fragments were designed as to contain first a Kozak site for eukaryotic expression of the construct, followed by the coding sequence of a 14 amino acid signal peptide, followed by the coding sequence of the first 278 (genotype 1a) or 279 (genotype 1b) amino acids of the HCV E2 envelope glycoprotein, a doubled myc epitope sequence and the coding sequence of the human CD4 transmembrane and intracellular domain corresponding to amino acids 372 to 433 of the mature protein (as published in GenBank accession number M12807) and a stop codon (the cDNA and amino acid sequences of the constructs were listed under SEQ ID NOs HCV-1 to HCV-4, genotypes 1a and 1b respectively). The gene synthesis fragments were also designed as to introduce restriction sites at the beginning and at the end of the fragment. The introduced restriction sites, EcoRI at the 5′ end and SalI at the 3′ end, were utilised in the following cloning procedures. The gene synthesis fragments were cloned via EcoRI and SalI into a plasmid designated pEF-DHFR (pEF-DHFR is described in Raum et al: Cancer Immunol Immunother 50 (2001) 141-150) following standard protocols. The afore-mentioned procedures were carried out according to standard protocols (Sambrook, Molecular Cloning; A Laboratory Manual, 3rd edition, Cold Spring Harbour Laboratory Press, Cold Spring Harbour, N.Y. (2001)). A clone with sequence-verified nucleotide sequence was transfected into DHFR deficient CHO cells for eukaryotic expression of the construct. Eukaryotic protein expression in DHFR deficient CHO cells was performed as described by Kaufmann R. J. (1990) Methods Enzymol. 185, 537-566. Gene amplification of the construct was induced by increasing concentrations of methotrexate (MTX) to a final concentration of up to 20 nM MTX. Finally two cell lines were generated: a CHO cell line with the HCV E2 domain genotype 1a expressed on the surface and another CHO cell line with the HCV E2 domain genotype 1b expressed on the surface.

[0900] 40.2 Cloning of a Cross-Species Bispecific Tandem Single Chain Antibody Fragment

[0901] Generally, a bispecific tandem single chain antibody fragment, comprising a domain with a binding specificity cross-species specific for human and macaque CD3epsilon as well as a domain with a binding specificity for HCV, was designed as set out in the following Table 16:

TABLE 16
Format of an anti-CD3 cross-species specific and anti-HCV antigen
specific bispecific tandem single chain antibody fragment

| SEQ ID | Format of protein construct |
|---|---|
| (nucl/prot) | (N → C) |
| 1664/1663 | HC1LH × I2CHL |

[0902] The aforementioned construct containing the variable light-chain (L) and variable heavy-chain (H) domains specific for HCV antigens and VH and VL combinations cross-species specific for human and macaque CD3 were obtained by gene synthesis. The gene synthesis fragment was designed as to contain first a Kozak site for eukaryotic expression of the construct, followed by a 19 amino acid immunoglobulin leader peptide, followed in frame by the coding sequence of the bispecific tandem single chain antibody fragment, followed in frame by the coding sequence of a histidine₆-tag and a stop codon. The gene synthesis fragment was also designed as to introduce suitable restriction sites at the beginning and at the end of the fragment. The introduced restriction sites were utilised in the following cloning procedures. The gene synthesis fragment was cloned via these restriction sites into a plasmid designated pEF-DHFR (pEF-DHFR is described in Raum et al. Cancer Immunol Immunother 50 (2001) 141-150) following standard protocols. The aforementioned procedures were carried out according to standard protocols (Sambrook, Molecular Cloning; A Laboratory Manual, 3rd edition, Cold Spring Harbour Laboratory Press, Cold Spring Harbour, N.Y. (2001)). A clone with sequence-verified nucleotide sequence was transfected into DHFR deficient CHO cells for eukaryotic expression of the bispecific tandem single chain antibody fragment. Eukaryotic protein expression in DHFR deficient CHO cells was performed as described by Kaufmann R. J. (1990) Methods Enzymol. 185, 537-566. Gene amplification of the construct was induced by increasing concentrations of methotrexate (MTX) to a final concentration of up to 20 nM MTX.

[0903] 40.3 Expression and Purification of the Bispecific Tandem Single Chain Antibody Fragment

[0904] The bispecific tandem single chain antibody fragment was expressed in Chinese hamster ovary cells (CHO). Eukaryotic protein expression in DHFR deficient CHO cells was performed as described by Kaufmann R. J. (1990) Methods Enzymol. 185, 537-566. Gene amplification of the constructs was induced by addition of increasing concentrations of MTX up to final concentrations of 20 nM MTX. After two passages of stationary culture the cells were grown in roller bottles with nucleoside-free HyQ PF CHO liquid soy medium (with 4.0 mM L-Glutamine with 0.1% Pluronic F-68; HyClone) for 7 days before harvest. The cells were removed by centrifugation and the supernatant containing the expressed protein was stored at −20° C. Alternatively, constructs were transiently expressed in HEK 293 cells. Transfection is performed with 293fectin reagent (Invitrogen, #12347-019) according to the manufacturer's protocol.

[0905] Äkta® Explorer System (GE Health Systems) and Unicorn® Software were used for chromatography. Immobilized metal affinity chromatography (“IMAC”) was performed using a Fractogel EMD chelate® (Merck) which was loaded with ZnCl₂ according to the protocol provided by the manufacturer. The column was equilibrated with buffer A (20 mM sodium phosphate buffer pH 7.2, 0.1 M NaCl) and the cell culture supernatant (500 ml) was applied to the column (10 ml) at a flow rate of 3 ml/min. The column was washed with buffer A to remove unbound sample. Bound protein was eluted using a two step gradient of buffer B (20 mM sodium phosphate buffer pH 7.2, 0.1 M NaCl, 0.5 M Imidazole) according to the following:

[0906] Step 1: 20% buffer B in 6 column volumes

[0907] Step 2: 100% buffer B in 6 column volumes

[0908] Eluted protein fractions from step 2 were pooled for further purification. All chemicals were of research grade and purchased from Sigma (Deisenhofen) or Merck (Darmstadt).

[0909] Gel filtration chromatography was performed on a HiLoad 16/60 Superdex 200 prep grade column (GE/Amersham) equilibrated with Equi-buffer (25 mM Citrate, 200 mM Lysine, 5% Glycerol, pH 7.2). Eluted protein samples (flow rate 1 ml/min) were subjected to standard SDS-PAGE and Western Blot for detection. Prior to purification, the column was calibrated for molecular weight determination (molecular weight marker kit, Sigma MW GF-200). Protein concentrations were determined using OD280 nm.

[0910] Purified bispecific tandem single chain antibody fragment Was analyzed in SDS PAGE under reducing conditions performed with pre-cast 4-12% Bis Tris gels (Invitrogen). Sample preparation and application were performed according to the protocol provided by the manufacturer. The molecular weight was determined with MultiMark protein standard (Invitrogen). The gel was stained with colloidal Coomassie (Invitrogen protocol). The purity of the isolated protein was >95% as determined by SDS-PAGE.

[0911] The bispecific tandem single chain antibody fragment has a molecular weight of about 52 kDa under native conditions as determined by gel filtration in PBS.

[0912] Western Blot was performed using an Optitran® BA-S83 membrane and the Invitrogen Blot Module according to the protocol provided by the manufacturer. The antibodies used are directed against the His Tag (Penta His, Qiagen) and Goat-anti-mouse Ig labeled with alkaline phosphatase (AP) (Sigma), and BCIP/NBT (Sigma) as substrate. A single band was detected at 52 kD corresponding to the purified bispecific tandem single chain antibody fragment.

[0913] 40.4 Flow Cytometric Binding Analysis of the HCV Antigen and CD3 Cross-Species Specific Bispecific Tandem Single Chain Antibody Fragment

[0914] In order to test the functionality of the cross-species specific bispecific tandem single chain antibody fragment regarding the capability to bind to HCV antigen and to human and macaque CD3, respectively, a FACS analysis was performed. For this purpose CHO cells transfected with HCV antigen E2 from two different HCV genotypes (1a and 1b) as described in Example 40.1, the human CD3 positive T cell leukemia cell line HPB-ALL (DSMZ, Braunschweig, ACC483) and the macaque T cell line 4119LnPx were used to test the binding to the respective antigens. 200000 cells of the respective cell lines were incubated for 30 min. on ice with 50 μl of cell culture supernatant of transfected cells expressing the cross-species specific bispecific antibody construct. The cells were washed twice in PBS with 2% FCS and binding of the bispecific tandem single chain antibody fragment was detected with a murine anti-His antibody (Penta His antibody; Qiagen; diluted 1:20 in 50 μl PBS with 2% FCS). After washing, bound anti-His antibodies were detected with an Fc gamma-specific antibody (Dianova) conjugated to phycoerythrin, diluted 1:100 in PBS with 2% FCS. PBS with 2% FCS.

[0915] Flow cytometry was performed on a FACS-Calibur apparatus; the CellQuest software was used to acquire and analyze the data (Becton Dickinson biosciences, Heidelberg). FACS staining and measuring of the fluorescence intensity were performed as described in Current Protocols in Immunology (Coligan, Kruisbeek, Margulies, Shevach and Strober, Wiley-Interscience, 2002).

[0916] Bispecific binding of the bispecific tandem single chain antibody fragment to HCV antigen and to human and non-chimpanzee primate CD3 was clearly detectable as shown in FIG. 67. In the FACS analysis the bispecific tandem single chain antibody fragment showed binding to CD3 and HCV antigens as compared to the respective negative controls. Cross-species specificity of the bispecific tandem single chain antibody fragment for human and macaque CD3 on the one hand and HCV-specificity on the other hand was demonstrated.

[0917] 40.5 Bioactivity of the HCV-Antigen and CD3 Cross-Species Specific Bispecific Tandem Single Chain Antibody Fragment

[0918] Bioactivity of the bispecific tandem single chain antibody fragment was analyzed by chromium 51 (⁵¹Cr) release in vitro cytotoxicity assays using the HCV antigen positive cell line described in Example 40.1. As effector cells stimulated human CD4/CD56 depleted PBMC from two different donors were used.

[0919] A Petri dish (145 mm diameter, Greiner bio-one GmbH, Kremsmünster) was coated with a commercially available anti-CD3 specific antibody (e.g. OKT3, Orthoclone) in a final concentration of 1 μg/ml for 1 hour at 37° C. Unbound protein was removed by one washing step with PBS. The fresh PBMC were isolated from peripheral blood (30-50 ml human blood) by FicoII gradient centrifugation according to standard protocols. 3-5×10⁷ PBMC were added to the precoated Petri dish in 120 ml of RPMI 1640 with stabilized glutamine/10% FCS/IL-2 20 U/ml (Proleukin, Chiron) and stimulated for 2 days. On the third day the cells were collected and washed once with RPMI 1640. IL-2 was added to a final concentration of 20 U/ml and the cells were cultured again for one day in the same cell culture medium as above.

[0920] By depletion of CD4+ T cells and CD56+ NK cells according to standard protocols CD8+ cytotoxic T lymphocytes (CTLs) were enriched.

[0921] Target cells were washed twice with PBS and labelled with 11.1 MBq ⁵¹Cr in a final volume of 100 μl RPMI with 50% FCS for 45 minutes at 37° C. Subsequently the labelled target cells were washed 3 times with 5 ml RPMI and then used in the cytotoxicity assay. The assay was performed in a 96 well plate in a total volume of 250 μl supplemented RPMI (as above) with an E:T ratio of 10:1. 76.4 μg/ml of the cross-species specific bispecific tandem single chain antibody fragment and 20 twofold dilutions thereof were applied. The assay time was 18 hours and cytotoxicity was measured as relative values of released chromium in the supernatant related to the difference of maximum lysis (addition of Triton-X) and spontaneous lysis (without effector cells). All measurements were done in quadruplicates. Measurement of chromium activity in the supernatants was performed with a Wizard 3″ gamma counter (Perkin Elmer Life Sciences GmbH, Köln, Germany). Analysis of the experimental data was performed with Prism 4 for Windows (version 4.02, GraphPad Software Inc., San Diego, Calif., USA).

[0922] As shown in FIG. 68, the cross-species specific bispecific tandem single chain antibody fragment demonstrated cytotoxic activity against human HCV antigen positive target cells.

[0923] 41. Bispecific Tandem Single Chain Antibody Fragments Directed at Human and Non-Chimpanzee Primate CD3 and at Hepatitis Virus Antigens Displayed on the Surface of Infected Cells

[0924] 41.1 Hepatitis B Virus (HBV)

[0925] The following degenerated oligonucleotides, that mutually overlap in a terminal stretch of approximately 15-20 nucleotides and wherein every second primer is an antisense primer, were used to provide a human VH sequence context for CDRH1 (SEQ ID 1634), CDRH2 (SEQ ID 1635) and CDRH3 (SEQ ID 1636):

5′C8-VH-A-XhoI
CCACTTCTCGAGTCTGGCGSCGRASTGMWGMAGCCTGGCGSCTCCSTGMR
GSTGTCCTGCRMGGCCTCCGGC
3′C8-VH-B
CCCTGGAGCCTGCCGCACCCAGGACATGGCGTAGCCGGWGAAGGTGWAGC
CGGAGGCCKYGCAGGA
5′C8-VH-C
CGGCAGGCTCCAGGGMAGGGACTGGAATGGRTGRGCTCCATCTCCGGCTC
CGGCGGCTCCACCTACTACGCCGACTCCGTGAAGGGCCGG
3′C8-VH-D
CTTGGCGCAGTAGTACASGGCGGTGTCCTCGGMCCGCAGGGAGYTCAKCT
SCAKGTACASGGTGYTCKTGGAGKTGTCCCGGSTSATTGTGAMCCGGCCC
TTCACGGA
3′C8-VH-E-BstEII
GACCGTGGTGACCAGGGTGCCCTGGCCCCAGTTGCCCAGAGGGAAGTAGT
AGATGGAGGAGCCGTAGTATTCCTGCCGGCCAGGAGGCTTGGCGCAGTAG
TA

[0926] This primer sets spans over the whole VH sequence. Within this set, primers were mixed in equal amounts (e.g. 1 μl of each primer (primer stocks 20 to 100 μM) to a 20 μl PCR reaction) and added to a PCR mix consisting of PCR buffer, nucleotides and Taq polymerase. This mix was incubated at 94° C. for 3 minutes, 65° C. for 1 minute, 62° C. for 1 minute, 59° C. for 1 minute, 56° C. for 1 minute, 52° C. for 1 minute, 50° C. for 1 minute and at 72° C. for 10 minutes in a PCR cycler. Subsequently the product was run in an agarose gel electrophoresis and the product of a size from 200 to 400 isolated from the gel according to standard methods.

[0927] The resulting VH PCR product was then used as a template for a standard PCR reaction using primers that incorporate N-terminal and C-terminal suitable cloning restriction sites (primer 5′C8-VH-A-XhoI and primer 3′C8-VH-E-BstEII). The DNA fragment of the correct size (for a VH approximately 350 nucleotides) was isolated by agarose gel electrophoresis according to standard methods. In this way sufficient VH DNA fragment was amplified.

[0928] The following degenerated oligonucleotides, that mutually overlap in a terminal stretch of approximately 15-20 nucleotides and wherein every second primer is an antisense primer, were used to provide a human VL sequence context for CDRL1 (SEQ ID 1639), CDRL2 (SEQ ID 1640) and CDRL3 (SEQ ID 1641), which were appendant to CDRH1 (SEQ ID 1634), CDRH2 (SEQ ID 1635) and CDRH3 (SEQ ID 1636):

5′C8-VI-A-SacI
CCTCAAGAGCTCGCCCTGAYGCAGCCTSCCTCCGTGTCCGTGKCCCYTGG
CMAGACCGCCMGCATCACCTGCGGCGGCAAC
3′C8-VI-B
CAGCACAGGGGMCTGTCCTGGCTTCTGCTGATACCAGTGCACGGACTTGG
AGCCGATGTTGTTGCCGCCGCAGGTGAT
5′C8-VI-C
CAGAAGCCAGGACAGKCCCCTGTGCTGGTCRTATACGACGACTCCGACCG
CCCTTCCGGCATCCCTGAGCGGTTCTCCGGCTCC
3′C8-VI-D
GACCTGGCAGTAGTAGTCGGCCTCGTCCMYGGCCTSCRCCCSGGAGATGG
TCAGGGTGRCGGTGKTGCCGGAGYTGGAGCCGGAGAACCG
3′C8-VI-E-BsiWI/SpeI
CCCGATACTAGTCGTACGCAGCACGGTCAGCTTTGTTCCGCCGCCAAACA
CCACCAGGTCGGAGGAGGAGTCCCAGACCTGGCAGTAGTAGTCGGC

[0929] This primer set spans over the whole corresponding VL sequence. Within this set, primers were mixed in equal amounts (e.g. 1 μl of each primer (primer stocks 20 to 100 μM) to a 20 μl PCR reaction) and added to a PCR mix consisting of PCR buffer, nucleotides and Taq polymerase. This mix was incubated at 94° C. for 3 minutes, 65° C. for 1 minute, 62° C. for 1 minute, 59° C. for 1 minute, 56° C. for 1 minute, 52° C. for 1 minute, 50° C. for 1 minute and at 72° C. for 10 minutes in a PCR cycler. Subsequently the product is run in an agarose gel electrophoresis and the product of a size from 200 to 400 isolated from the gel according to standard methods.

[0930] The resulting VL PCR product was then used as a template for a standard PCR reaction using primers that incorporate N-terminal and C-terminal suitable cloning restriction sites (primer 5′C8-VI-A-SacI and primer 3′C8-VI-E-BsiWI/SpeI). The DNA fragment of the correct size (for a VL approximately 330 nucleotides) was isolated by agarose gel electrophoresis according to standard methods. In this way sufficient VL DNA fragment was amplified.

[0931] The final VH PCR product (i.e. the repertoire of human/humanized VH) was then combined with its respective final VL PCR product (i.e. the repertoire of human/humanized VL) in the phage display vector pComb3H5Bhis to form a library of functional scFv antibody fragments from which—after display on filamentous phage—anti-HBS binders were selected, screened, identified and confirmed as described as follows:

[0932] 450 ng of the light chain fragments (SacI-SpeI digested) were ligated with 1400 ng of the phagemid pComb3H5Bhis (SacI-SpeI digested; large fragment). The resulting combinatorial antibody library was then transformed into 300 ul of electrocompetent Escherichia coli XL1 Blue cells by electroporation (2.5 kV, 0.2 cm gap cuvette, 25 uFD, 200 Ohm, Biorad gene-pulser) resulting in a library size of more than 10⁷ independent clones. After one hour of phenotype expression, positive transformants were selected for carbenicilline resistance encoded by the pComb3H5BHis vector in 100 ml of liquid super broth (SB)-culture over night. Cells were then harvested by centrifugation and plasmid preparation was carried out using a commercially available plasmid preparation kit (Qiagen).

[0933] 2800 ng of this plasmid-DNA containing the VL-library (XhoI-BstEII digested; large fragment) were ligated with 900 ng of the heavy chain V-fragments (XhoI-BstEII digested) and again transformed into two 300 ul aliquots of electrocompetent E. coli XL1 Blue cells by electroporation (2.5 kV, 0.2 cm gap cuvette, 25 uFD, 200 Ohm) resulting in a total library size of VH-VL scFv antibody fragments of more than 10⁷ independent clones.

[0934] After phenotype expression and slow adaptation to carbenicillin, the E. coli cells containing the antibody library were transferred into SB-Carbenicillin (50 μg/mL) selection medium. The E. coli cells containing the antibody library was then infected with an infectious dose of 10¹² particles of helper phage VCSM13 resulting in the production and secretion of filamentous M13 phage, wherein phage particle contains single stranded pComb3H5BHis-DNA encoding a scFv antibody fragment and displayed the corresponding scFv antibody fragment as a translational fusion to phage coat protein III. This pool of phages displaying the antibody library was used for the selection of antigen binding entities.

[0935] Likewise the foregoing procedure was applied for another target binder. For this purpose the following degenerated oligonucleotides, that mutually overlap in a terminal stretch of approximately 15-20 nucleotides and wherein every second primer is an antisense primer, were used to provide a human VH sequence context for CDRH1 (SEQ ID 1669), CDRH2 (SEQ ID 1670) and CDRH3 (SEQ ID 1671):

5′C9-VH-A-XhoI
CCACTTCTCGAGTCTGGGGSAGRGGTGRWGMAGCCTGGGRSGTCCSTGAR
ASTCTCCTGTGCAGCCTCTGGA
3′C9-VH-B
CCACTCCAGCCCCTKGCCTGGAGCCTGGCGGACCCAGTGTATGCCATAAT
TACTGAAGGTGWATCCAGAGGCTGCACAGGA
5′C9-VH-C
GCTCCAGGGMAGGGGCTGGAGTGGRTGGSACTTATATCATATGATGGAAA
TAAGAAATTCTATGCAGACTCCGTGAAGGGCCGA
3′C9-VH-D
GTAATATACAGCCGTGTCCTCAGRTCTCAGGCTGCTCAKTTSCAKATMCA
CCGTGYTCKTAGAAGTGTCTCTGGTSATGGYGAMTCGGCCCTTCACGGAG
TC
3′C9-VH-E-BstEII
GACCGTGGTGACCAGGGTTCCCTGGCCCCAGTAGTCAAATTCCCCCCAGT
ACAAGGCAATACCCCCAGATTTCGCACAGTAATATACAGCCGTGTC

[0936] As primers for the final standard PCR reaction to incorporate N-terminal and C-terminal suitable cloning restriction sites into VH the oligonucleotides 5′C9-VH-A-XhoI and 3′C9-VH-E-BstEII were used.

[0937] Analogous to VH, the following degenerated oligonucleotides, that mutually overlap in a terminal stretch of approximately 15-20 nucleotides and wherein every second primer is an antisense primer, were used to provide a human VL sequence context for CDRL1 (SEQ ID 1672), CDRL2 (SEQ ID 1673) and CDRL3 (SEQ ID 1674), which are appendant to CDRH1 (SEQ ID 1669), CDRH2 (SEQ ID 1670) and CDRH3 (SEQ ID 1671):

5′C9-VI-A-SacI
CCTCAAGAGCTCGWACTGACTCAGCCACCCTCGGTGTCAGYGGCCCCAGG
ACAGAMGGYCAYGATTTCCTGTGGGGGAAAC
3′C9-VI-B
GCCTGGCWKCTGCTGATACCAGTGCACGGTTGTACTTCCAATGTTGTTTC
CCCCACAGGAAAT
5′C9-VI-C
TGGTATCAGCAGMWGCCAGGCMMGGCCCCTRWGCTGSTCRTCTATGATGA
TAACGAGCGACCCTCAGGGATCCCTGASCGATTCTCTGGCTCC
3′C9-VI-D
CACTTGACAATAATAGTCGGCCTCATCCCCGGYTTSGASCCYGKTGATGS
YCAGGGTGGCCGAGGTCCCAGASTTGGAGCCAGAGAATCG
3′C9-VI-E-BsiWI/SpeI
CCCGATACTAGTCGTACGTAGGACGGTCAGCTTCGTCCCTCCGCCGAATA
CCACATGATCACTACCACTATCCCACACTTGACAATAATAGTC

[0938] As primers for the final standard PCR reaction to incorporate N-terminal and C-terminal suitable cloning restriction sites into VL the oligonucleotides 5′C9-VI-A-SacI and 3′C9-VI-E-BsiWI/SpeI were used.

[0939] For the selection of antigen binding entities the phage library carrying the cloned scFv-repertoire was harvested from the respective culture supernatant by PEG (polyethyleneglycole) 8000/NaCl precipitation and centrifugation. Approximately 10¹¹ to 10¹² scFv phage particles are resuspended in 0.4 ml of PBS/0.1% BSA and incubated with immobilized HBS antigen (e.g. EngerixR-B, GlaxoSmithKline, Germany; HBvaxPro™, Aventis Pasteur MSD SNC, France) for 2 h under gentle agitation at 37° C. The immobilized HBS antigen (e.g. 5 μg/ml PBS) was coated to the wells and the wells subsequently blocked according to standard protocols.

[0940] Phage particles displaying scFv antibody fragments that do not specifically bind to the target antigen were eliminated by washing steps with PBS/0.1% BSA (Tween 20 can be added to the washing solution to increase washing stringency). After washing, binding entities were eluted by using HCl-glycine pH 2.2 and after neutralization with 2 M Tris pH 12, the eluate was used for infection of a fresh uninfected E. coli XL1 Blue culture.

[0941] To elute remaining strong binding entities in the eluted wells, 200 ul of a fresh E. coli XL1 blue culture (OD600>0.5) were added to the eluted wells and incubated for further 10 minutes under gentle agitation. Both E. coli cultures were then mixed and cells successfully transduced with a phagemid copy, encoding a human scFv antibody fragment, were again selected for carbenicillin resistance and subsequently infected with VCMS 13 helper phage to start the second round of antibody display and in vitro selection. A total of 4 to 5 rounds of selections was carried out, normally.

[0942] In order to screen for HBS specific binders plasmid DNA corresponding to 4 and 5 rounds of panning was isolated from E. coli cultures after selection. For the production of soluble scFv antibody fragment, VH-VL-DNA fragments were excised from the plasmids (XhoI-SpeI). These fragments were cloned via the same restriction sites into the plasmid pComb3H5BFlag/His differing from the original pComb3H5BHis in that the expression construct (e.g. scFv antibody fragment) includes a Flag-tag (DYKDDDDK) between the scFv antibody fragment and the His₆-tag and the additional phage proteins were deleted. After ligation, each pool (different rounds of panning) of plasmid DNA was transformed into 100 μl heat shock competent E. coli TG1 or XLI blue and plated onto carbenicillin LB-agar. Single colonies were picked into 100 ul of LB carb (50 μg/ml).

[0943] E. coli transformed with pComb3H5BHis containing a VL-and VH-segment produce soluble scFv antibody fragment in sufficient amounts after excision of the gene III fragment and induction with 1 mM IPTG. Due to a suitable signal sequence, the scFv antibody fragment was exported into the periplasma where it folds into a functional conformation.

[0944] Single E. coli TG1 bacterial colonies from the transformation plates were picked for periplasmic small scale preparations and grown in SB-medium (e.g. 10 ml) supplemented with 20 mM MgCl₂ and carbenicillin 50 μg/ml (and re-dissolved in PBS (e.g. 1 ml) after harvesting. By four rounds of freezing at −70° C. and thawing at 37° C., the outer membrane of the bacteria was destroyed by temperature shock and the soluble periplasmic proteins including the scFv antibody fragments were released into the supernatant. After elimination of intact cells and cell-debris by centrifugation, the supernatant containing the anti-HBS scFv antibody fragments was collected and used for the identification of HBS specific binders as follows:

[0945] HBS antigen was coated on wells of 96 well plastic plates (Nunc, maxisorb) typically at 4° C. over night. Wells were washed once with PBS/0.05% Tween 20 and subsequently blocked with PBS/3% BSA for at least one hour. After removal of the blocking solution, periplasma preparations and control solutions were added to the wells and incubated for typically one hour at room temperature. The wells were then washed three times with PBS/0.05% Tween 20. Detection of scFv antibody fragments and control antibodies bound to immobilized antigen was carried out using a monoclonal murine anti-His₆ or anti FLAG-tag antibody (Qiagen anti-PentaHis and M2 anti Flag Sigma, typically each at a final concentration of 1 μg/ml PBS) detected with a peroxidase-labeled polyclonal goat anti-mouse Fab-fragment antibody (Dianova,1 μg/ml PBS). The signal was developed by adding ABTS substrate solution and measured at a wavelength of 405 nm. Unspecific binding of the test-samples to the blocking agent was examined by carrying out the identical assays with the identical reagents and identical timing on ELISA plates which were not antigen-coated but blocked with BSA, only.

[0946] To exclude the possibility that the positive binding might be due to binding to BSA (to be used as a blocking agent in the first ELISA experiment), a second ELISA experiment was performed in parallel. In this second ELISA experiment, all parameters were identical to those in the first ELISA experiment, except that in the second ELISA experiment no coating with antigen, but only blocking with BSA takes place.

[0947] In order to identify those HBS-specific scFv antibody fragments identified by ELISA, which also bind to HBS-antigen as displayed on the surface of HBV-infected cells, indirect immunofluorescence with FLAG-tagged scFv antibody fragment followed by FITC-conjugated anti-FLAG antibody on HepG2.2.15 cells (Bohne F, Chmielewski M, Ebert G, et al. T cells redirected against hepatitis B virus surface proteins eliminate infected hepatocytes. Gastroenterology 2008; 134:239-47) was carried out according to standard protocols (e.g. Current Protocols in Immunology, Coligan, Kruisbeek, Margulies, Shevach and Strober, Wiley-Interscience, 2002, unit 21.3). Uninfected HepG2 cells served as negative control. Culture conditions of HepG2.2.15 cells for optimal display of HBS-antigen on the cell surface were described by Bohne et al. (Bohne F, Chmielewski M, Ebert G, et al. T cells redirected against hepatitis B virus surface proteins eliminate infected hepatocytes. Gastroenterology 2008; 134:239-47).

[0948] Clones confirmed to specifically bind to the HBS antigen on the surface of HBV infected cells were then analyzed for favourable protein properties and amino acid sequence. HBS specific scFv antibody fragments were converted into recombinant bispecific tandem single chain antibody fragments by joining them via a Gly₄Ser₁-linker with the CD3 specific scFv antibody fragment 12C (SEQ ID 185) or any other CD3 specific scFv antibody fragment of the invention to result in constructs with the domain arrangement VH_{Muc1}-(Gly₄Ser₁)₃-VL_{Muc1}-Gly₄Ser₁-VH_{CD3}-(Gly₄Ser₁)₃-VL_{CD3} or alternative domain arrangements. For expression in CHO cells the coding sequences of (i) an N-terminal immunoglobulin heavy chain leader comprising a start codon embedded within a Kozak consensus sequence and (ii) a C-terminal His₆-tag followed by a stop codon were both attached in frame to the nucleotide sequence encoding the bispecific tandem single chain antibody fragments prior to insertion of the resulting DNA-fragment as obtained by gene synthesis into the multiple cloning site of the expression vector pEF-DHFR (Raum et al. Cancer Immunol Immunother 50 (2001) 141-150). Stable transfection of DHFR-deficient CHO cells, selection for DHFR-positive transfectants secreting the bispecific single chain antibodies into the culture supernatant and gene amplification with methotrexat for increasing expression levels were carried out as described (Mack et al. Proc. Natl. Acad. Sci. USA 92 (1995) 7021-7025). All other state of the art procedures were carried out according to standard protocols (Sambrook, Molecular Cloning; A Laboratory Manual, 3rd edition, Cold Spring Harbour Laboratory Press, Cold Spring Harbour, N.Y. (2001)).

[0949] Functional bispecific tandem single chain antibody fragments were identified by ELISA and flowcytometry using culture supernatant from transfected CHO cells. For this purpose CD3 binding was tested on the human CD3 positive T cell leukemia cell line HPB-ALL (DSMZ, Braunschweig, ACC483) and on the macaque T cell line 4119LnPx. 200.000 cells of the respective cell line were incubated for 30 min. on ice with 50 μl of cell culture supernatant. The cells were washed twice in PBS with 2% FCS and bound bispecific tandem single chain antibody fragment was detected with a murine anti-His antibody (Penta His antibody; Qiagen; diluted 1:20 in 50 μl PBS with 2% FCS). After washing, bound anti-His antibodies were detected with an Fc gamma-specific antibody (Dianova) conjugated to phycoerythrin, diluted 1:100 in PBS with 2% FCS. Supernatant of untransfected CHO cells was used as negative control.

[0950] Flow cytometry was performed on a FACS-Calibur apparatus; the CellQuest software is used to acquire and analyze the data (Becton Dickinson biosciences, Heidelberg). FACS staining and measuring of the fluorescence intensity are performed as described in Current Protocols in Immunology (Coligan, Kruisbeek, Margulies, Shevach and Strober, Wiley-Interscience, 2002). Binding to HBS antigen was tested by ELISA as described above. Detection of bound bispecific tandem single chain antibody fragment was carried out using a monoclonal murine anti-His₆ antibody (Qiagen anti-PentaHis typically at a final concentration of 1 μg/ml PBS) followed by a peroxidase-labeled polyclonal goat anti-mouse Fab-fragment antibody (Dianova, 1 ug/ml PBS).

[0951] Only those constructs showing bispecific binding to human and macaque CD3 as well as to HBS antigen were selected for further use.

[0952] For protein production, CHO cells expressing fully functional bispecific tandem single chain antibody fragments and adapted to nucleoside-free HyQ PF CHO liquid soy medium (with 4.0 mM L-Glutamine with 0.1% Pluronic F-68; HyClone) were grown in roller bottles with nucleoside-free HyQ PF CHO liquid soy medium (with 4.0 mM L-Glutamine with 0.1% Pluronic F-68; HyClone) for 7 days. Culture supernatant was cleared from cells by centrifugation and stored at −20° C. until purification. As chromatography equipment for purification of bispecific tandem single chain antibody fragment from culture supernatant Äkta® Explorer System (GE Health Systems) and Unicorn® Software were used. Immobilized metal affinity chromatography (“IMAC”) was performed using a Fractogel EMD chelate® (Merck) which was loaded with ZnCl₂ according to the protocol provided by the manufacturer. The column was equilibrated with buffer A (20 mM sodium phosphate buffer pH 7.2, 0.1 M NaCl) and the cell culture supernatant (500 ml) was applied to the column (10 ml) at a flow rate of 3 ml/min. The column was washed with buffer A to remove unbound sample. Bound protein was eluted using a two step gradient of buffer B (20 mM sodium phosphate buffer pH 7.2, 0.1 M NaCl, 0.5 M Imidazole) according to the following:

[0953] Step 1: 20% buffer B in 6 column volumes

[0954] Step 2: 100% buffer B in 6 column volumes

[0955] Eluted protein fractions from step 2 were pooled for further purification. All chemicals are of research grade and purchased from Sigma (Deisenhofen) or Merck (Darmstadt).

[0956] Gel filtration chromatography was performed on a HiLoad 16/60 Superdex 200 prep grade column (GE/Amersham) equilibrated with Equi-buffer (25 mM Citrate, 200 mM Lysine, 5% Glycerol, pH 7.2). Eluted protein samples (flow rate 1 ml/min) were subjected to standard SDS-PAGE and Western Blot for detection. Prior to purification, the column was calibrated for molecular weight determination (molecular weight marker kit, Sigma MW GF-200). Protein concentrations are determined using OD280 nm.

[0957] Purified bispecific tandem single chain antibody fragment was analyzed in SDS PAGE under reducing conditions performed with pre-cast 4-12% Bis Tris gels (Invitrogen). Sample preparation and application were performed according to the protocol provided by the manufacturer. The molecular weight was determined with MultiMark protein standard (Invitrogen). The gel was stained with colloidal Coomassie (Invitrogen protocol). The purity of the isolated protein is >95% as determined by SDS-PAGE.

[0958] The bispecific tandem single chain antibody fragment has a molecular weight of about 52 kDa under native conditions as determined by gel filtration in PBS. All constructs were purified according to this method.

[0959] Western Blot was performed using an Optitran® BA-S83 membrane and the Invitrogen Blot Module according to the protocol provided by the manufacturer. For detection of the bispecific tandem single chain antibody fragments, an anti-His Tag antibody was used (Penta His, Qiagen). A Goat-anti-mouse Ig antibody labeled with alkaline phosphatase (AP) (Sigma) was used as secondary antibody and BCIP/NBT (Sigma) as substrate. A single band was detected at 52 kD corresponding to the purified bispecific tandem single chain antibody fragment.

[0960] The potency in the human and the non-chimpanzee primate system of bispecific tandem single chain antibody fragments interacting with human and macaque CD3 and with HBS antigen was determined by a non-radioactive cytotoxicity assay using HepG2.2.15 cells as target cells as described by Bohne et al. (Bohne F, Chmielewski M, Ebert G, et al. T cells redirected against hepatitis B virus surface proteins eliminated infected hepatocytes. Gastroenterology 2008; 134:239-47) and stimulated human CD4/CD56 depleted PBMC or the macaque T cell line 4119LnPx instead of T cells transduced with a chimeric T cell receptor as effector cells. In order to obtain dose-response-curves, the concentration of each bispecific tandem single chain antibody fragment (instead of the E:T-ratio as described by Bohne et al.) was titrated in the cytotoxicity assay at a fixed E:T-ratio (e.g. 10:1 or 5:1).

[0961] Generation of stimulated human PBMC was performed as follows:

[0962] A Petri dish (85 mm diameter, Nunc) was coated with a commercially available anti-CD3 specific antibody (e.g. OKT3, Othoclone) in a final concentration of 1 μg/ml for 1 hour at 37° C. Unbound protein was removed by one washing step with PBS. The fresh PBMC were isolated from peripheral blood (30-50 ml human blood) by FicoII gradient centrifugation according to standard protocols. 3-5×10⁷ PBMC were added to the precoated petri dish in 50 ml of RPMI 1640 with stabilized glutamine/10% FCS/IL-2 20 U/ml (Proleukin, Chiron) and stimulated for 2 days. On the third day the cells were collected and washed once with RPMI 1640. IL-2 was added to a final concentration of 20 U/ml and the cells were cultivated again for one day in the same cell culture medium as above.

[0963] Analysis of the experimental data from the cytotoxicity assay was performed with Prism 4 for Windows (version 4.02, GraphPad Software Inc., San Diego, Calif., USA). Sigmoidal dose response curves typically have R² values >0.90 as determined by the software. EC₅₀ values as measure of potency were calculated by the analysis program.

[0964] 41.2 Hepatitis C Virus (HCV)

[0965] The following degenerated oligonucleotides, that mutually overlap in a terminal stretch of approximately 15-20 nucleotides and wherein every second primer is an antisense primer, are used to provide a human VH sequence context for CDRH1 (SEQ ID 1652), CDRH2 (SEQ ID 1653) and CDRH3 (SEQ ID 1654):

5′HC1-VH-A-XhoI
CAGCTACTCGAGTSGGGCGSAGGACTGKTGMAGCCTKSGGRGTCCCTGAG
WCTCTCCTGCGCTG
3′HC1-VH-B
CCACTCCAGCCCCTTCCCAGGGGMCTGGCGGAYCCAGGTCCAGAAGTAAC
CACTWAAGGTAMMACCAKAGRCAGCGCAGGAGAGWCTCAGGGAC
5′HC1-VH-C
CTGGGAAGGGGCTGGAGTGGRTTRGTGAAAGCAATTATAGTGGAAGTACC
AGGTACAACCCGTCCCTCAAGAGTCGAKTCACCATATCA
3′HC1-VH-D
ATACAGCCGTGTCCKCGGCTSTCASAGAAYTCAKCTKCAGGKAGARCKKG
TTCTKGGAGKTGTCTMYTGATATGGTGAMTCGACTCTTG
5′HC1-VH-E
AGCCGMGGACACGGCTGTATATTACTGTGCGAGAGGTTGGGCGGTGGACG
GTATGGACGTCTGGGGCCGAGGGACCTTGGTCACCGTC
3′HC1-VH-F-BstEII
GAGACGGTGACCAAGGTCCCTCGGCCCCAGACGTCCATACC

[0966] This primer sets spans over the whole VH sequence. Within this set, primers were mixed in equal amounts (e.g. 1 μl of each primer (primer stocks 20 to 100 μM) to a 20 μl PCR reaction) and added to a PCR mix consisting of PCR buffer, nucleotides and Taq polymerase. This mix was incubated at 94° C. for 3 minutes, 65° C. for 1 minute, 62° C. for 1 minute, 59° C. for 1 minute, 56° C. for 1 minute, 52° C. for 1 minute, 50° C. for 1 minute and at 72° C. for 10 minutes in a PCR cycler. Subsequently the product was run in an agarose gel electrophoresis and the product of a size from 200 to 400 isolated from the gel according to standard methods.

[0967] The resulting VH PCR product was then used as a template for a standard PCR reaction using primers that incorporate N-terminal and C-terminal suitable cloning restriction sites (primer 5′HC1-VH-A-XhoI and primer 3′HC1-VH-F-BstEII). The DNA fragment of the correct size (for a VH approximately 350 nucleotides) was isolated by agarose gel electrophoresis according to standard methods. In this way sufficient VH DNA fragment was amplified.

[0968] The following degenerated oligonucleotides, that mutually overlap in a terminal stretch of approximately 15-20 nucleotides and wherein every second primer was an antisense primer, were used to provide a human VL sequence context for CDRL1 (SEQ ID 1657), CDRL2 (SEQ ID 1658) and CDRL3 (SEQ ID 1659), which are appendant to CDRH1 (SEQ ID 1652), CDRH2 (SEQ ID 1653) and CDRH3 (SEQ ID HC1 1654):

5′HC1-VI-A-SacI
ACTAGCGAGCTCGWGCTGACACAGCCACCCTCG
5′HC1-VI-B
GCTGACACAGCCACCCTCGGYGTCAGKGACCCCAGGACAGASGGYCASGA
TCTCCTGCTCTGGAGATGCATTGCCAAAGCAATATGC
3′HC1-VI-C
CCCTGAGGGCCTCTCATTATCTTTATATATCASCAACWYAGGGGCCKKGC
CTGGCWKCTGCTGATACCAGTAAGCATATTGCTTTGGCAATGC
5′HC1-VI-D
GATAATGAGAGGCCCTCAGGGRTCCCTGASCGATTCTCTGGCTCCARGTC
AGGGACATCAGYCTCGTTGRCCATCAGTGGASTCMRGKCAGAAGACGAGG
CTGACTA
3′HC1-VI-E-BsiWI/SpeI
GCTACTACTAGTCGTACGTAGGACGGTCAGCTGGGTCCCTCCGCCGAACA
CCCAGGAAGAACCACTGCTGTCTGCTGATTGACAGTAATAGTCAGCCTCG
TCTTCTG

[0969] This primer set spans over the whole corresponding VL sequence. Within this set, primers were mixed in equal amounts (e.g. 1 μl of each primer (primer stocks 20 to 100 μM) to a 20 μl PCR reaction) and added to a PCR mix consisting of PCR buffer, nucleotides and Taq polymerase. This mix was incubated at 94° C. for 3 minutes, 65° C. for 1 minute, 62° C. for 1 minute, 59° C. for 1 minute, 56° C. for 1 minute, 52° C. for 1 minute, 50° C. for 1 minute and at 72° C. for 10 minutes in a PCR cycler. Subsequently the product was run in an agarose gel electrophoresis and the product of a size from 200 to 400 isolated from the gel according to standard methods.

[0970] The resulting VL PCR product was then used as a template for a standard PCR reaction using primers that incorporate N-terminal and C-terminal suitable cloning restriction sites (primer 5′HC1-VI-A-SacI and primer 3′HC1-VI-E-BsiWI/SpeI). The DNA fragment of the correct size (for a VL approximately 330 nucleotides) was isolated by agarose gel electrophoresis according to standard methods. In this way sufficient VL DNA fragment was amplified.

[0971] The final VH PCR product (i.e. the repertoire of human/humanized VH) was then combined with its respective final VL PCR product (i.e. the repertoire of human/humanized VL) in the phage display vector pComb3H5Bhis to form a library of functional scFv antibody fragments from which—after display on filamentous phage—anti-HBS binders were selected, screened, identified and confirmed as described as follows:

[0972] 450 ng of the light chain fragments (SacI-SpeI digested) are ligated with 1400 ng of the phagemid pComb3H5Bhis (SacI-SpeI digested; large fragment). The resulting combinatorial antibody library was then transformed into 300 ul of electrocompetent Escherichia coli XL1 Blue cells by electroporation (2.5 kV, 0.2 cm gap cuvette, 25 uFD, 200 Ohm, Biorad gene-pulser) resulting in a library size of more than 10⁷ independent clones. After one hour of phenotype expression, positive transformants were selected for carbenicilline resistance encoded by the pComb3H5BHis vector in 100 ml of liquid super broth (SB)-culture over night. Cells are then harvested by centrifugation and plasmid preparation was carried out using a commercially available plasmid preparation kit (Qiagen).

[0973] 2800 ng of this plasmid-DNA containing the VL-library (XhoI-BstEII digested; large fragment) were ligated with 900 ng of the heavy chain V-fragments (XhoI-BstEII digested) and again transformed into two 300 ul aliquots of electrocompetent E. coli XL1 Blue cells by electroporation (2.5 kV, 0.2 cm gap cuvette, 25 uFD, 200 Ohm) resulting in a total VH-VL scFv (single chain variable fragment) library size of more than 10⁷ independent clones.

[0974] After phenotype expression and slow adaptation to carbenicillin, the E. coli cells containing the antibody library were transferred into SB-Carbenicillin (50 μg/mL) selection medium. The E. coli cells containing the antibody library was then infected with an infectious dose of 10¹² particles of helper phage VCSM13 resulting in the production and secretion of filamentous M13 phage, wherein phage particle contains single stranded pComb3H5BHis-DNA encoding a scFv antibody fragment and displayed the corresponding scFv antibody fragment as a translational fusion to phage coat protein III. This pool of phages displaying the antibody library was used for the selection of antigen binding entities.

[0975] For this purpose the phage library carrying the cloned repertoire of scFv antibody fragments was harvested from the respective culture supernatant by PEG8000/NaCl precipitation and centrifugation. Approximately 10¹¹to 10¹² phage particles displaying scFv antibody fragment are resuspended in 0.4 ml of PBS/0.1% BSA and incubated with 10⁵ to 10⁷ CHO cells transfected with HCV antigen E2 from HCV genotypes 1a and/or 1b as described in Example 40.1 for 1 hour on ice under slow agitation. These HCV-antigen transfected CHO cells were harvested beforehand by centrifugation, washed in PBS and resuspended in PBS/1% FCS (containing Na Azide). Phage particles displaying scFv antibody fragments, which do not specifically bind to the HCV-antigen transfected CHO cells, were eliminated by up to five washing steps with PBS/1% FCS (containing Na Azide). After washing, binding entities were eluted from the cells by resuspending the cells in HCl-glycine pH 2.2 (10 min incubation with subsequent vortexing) and after neutralization with 2 M Tris pH 12, the eluate was used for infection of a fresh uninfected E. coli XL1 Blue culture (OD600 >0.5). The E. coli culture containing E. coli cells successfully transduced with a phagemid copy, encoding a human/humanized scFv antibody fragment, were again selected for carbenicillin resistance and subsequently infected with VCMS 13 helper phage to start the second round of antibody display and in vitro selection. A total of 4 to 5 rounds of selections are carried out, normally.

[0976] In order to screen for HCV-antigen specific binders plasmid DNA corresponding to 4 and 5 rounds of panning was isolated from E. coli cultures after selection. For the production of soluble scFv antibody fragment, VH-VL-DNA fragments were excised from the plasmids (XhoI-SpeI). These fragments were cloned via the same restriction sites into the plasmid pComb3H5BFlag/His differing from the original pComb3H5BHis in that the expression construct (e.g. scFv antibody fragment) includes a Flag-tag (DYKDDDDK) between the scFv antibody fragment and the His₆-tag and the additional phage proteins were deleted. After ligation, each pool (different rounds of panning) of plasmid DNA was transformed into 100 μl heat shock competent E. coli TG1 or XLI blue and plated onto carbenicillin LB-agar. Single colonies were picked into 100 ul of LB carb (50 μg/ml).

[0977] E. coli transformed with pComb3H5BHis containing a VL-and VH-segment produce soluble scFv antibody fragment in sufficient amounts after excision of the gene III fragment and induction with 1 mM IPTG. Due to a suitable signal sequence, the scFv antibody fragment was exported into the periplasma where it folds into a functional conformation.

[0978] Single E. coli TG1 bacterial colonies from the transformation plates were picked for periplasmic small scale preparations and grown in SB-medium (e.g. 10 ml) supplemented with 20 mM MgCl₂ and carbenicillin 50 μg/m1 (and re-dissolved in PBS (e.g. 1 ml) after harvesting. By four rounds of freezing at −70° C. and thawing at 37° C., the outer membrane of the bacteria was destroyed by temperature shock and the soluble periplasmic proteins including the scFv antibody fragments are released into the supernatant. After elimination of intact cells and cell-debris by centrifugation, the supernatant containing the anti-HCV scFv antibody fragments was collected and used for the identification of HCV-anigen specific binders as follows:

[0979] Binding of scFv antibody fragments to HCV is tested by flow cytometry on HCV-antigen transfected CHO cells (see Example 40.1); untransfected CHO cell were used as negative control.

[0980] For flow cytometry 2.5×10⁵ cells were incubated with 50 ul periplasmic preparation scFv antibody fragment or with 5 μg/ml of purified scFv antibody fragments in 50 μl PBS with 2% FCS. The binding of scFv antibody fragment was detected with an anti-His antibody (Penta-His Antibody, BSA free, Qiagen GmbH, Hilden, FRG) at 2 μg/ml in 50 μl PBS with 2% FCS. As a second step reagent a R-Phycoerythrin-conjugated affinity purified F(ab′)2 fragment, goat anti-mouse IgG (Fc-gamma fragment specific), diluted 1:100 in 50 μl PBS with 2% FCS (Dianova, Hamburg, FRG) was used. The samples were measured on a FACSscan (BD biosciences, Heidelberg, FRG).

[0981] Single clones were then analyzed for favourable properties and amino acid sequence. HCV specific scFv antibody fragments were converted into recombinant bispecific tandem single chain antibody fragments by joining them via a Gly₄Ser₁-linker with the CD3 specific scFv antibody fragment 12C (SEQ ID 185) or any other CD3 specific scFv antibody fragment of the invention to result in constructs with the domain arrangement VH_{Muc1}-(Gly₄Ser₁)₃-VL_{Muc1}-Gly₄Ser₁-VH_{CD3}-(Gly₄Ser₁)₃-VL_{CD3} or alternative domain arrangements. For expression in CHO cells the coding sequences of (i) an N-terminal immunoglobulin heavy chain leader comprising a start codon embedded within a Kozak consensus sequence and (ii) a C-terminal His₆-tag followed by a stop codon were both attached in frame to the nucleotide sequence encoding the bispecific tandem single chain antibody fragments prior to insertion of the resulting DNA-fragment as obtained by gene synthesis into the multiple cloning site of the expression vector pEF-DHFR (Raum et al. Cancer Immunol Immunother 50 (2001) 141-150). Stable transfection of DHFR-deficient CHO cells, selection for DHFR-positive transfectants secreting the bispecific tandem single chain antibody fragments into the culture supernatant and gene amplification with methotrexat for increasing expression levels were carried out as described (Mack et al. Proc. Natl. Acad. Sci. USA 92 (1995) 7021-7025). All other state of the art procedures were carried out according to standard protocols (Sambrook, Molecular Cloning; A Laboratory Manual, 3rd edition, Cold Spring Harbour Laboratory Press, Cold Spring Harbour, N.Y. (2001)).

[0982] Identification of functional bispecific tandem single chain antibody fragments was carried out by flowcytometric analysis of culture supernatant from transfected CHO cells. For this purpose CD3 binding was tested on the human CD3 positive T cell leukemia cell line HPB-ALL (DSMZ, Braunschweig, ACC483) and on the macaque T cell line 4119LnPx. Binding to HCV was tested on HCV-antigen transfected CHO cells (see Example 40.1). 200.000 cells of the respective cell line were incubated for 30 min. on ice with 50 μl of cell culture supernatant. The cells were washed twice in PBS with 2% FCS and bound bispecific tandem single chain antibody fragment was detected with a murine anti-His antibody (Penta His antibody; Qiagen; diluted 1:20 in 50 μl PBS with 2% FCS). After washing, bound anti-His antibodies were detected with an Fc gamma-specific antibody (Dianova) conjugated to phycoerythrin, diluted 1:100 in PBS with 2% FCS. Supernatant of untransfected CHO cells was used as negative control.

[0983] Flow cytometry was performed on a FACS-Calibur apparatus; the CellQuest software was used to acquire and analyze the data (Becton Dickinson biosciences, Heidelberg). FACS staining and measuring of the fluorescence intensity were performed as described in Current Protocols in Immunology (Coligan, Kruisbeek, Margulies, Shevach and Strober, Wiley-Interscience, 2002).

[0984] Only those constructs showing bispecific binding to human and macaque CD3 as well as to HCV-antigen were selected for further use.

[0985] For protein production CHO cells expressing fully functional bispecific tandem single chain antibody fragment and adapted to nucleoside-free HyQ PF CHO liquid soy medium (with 4.0 mM L-Glutamine with 0.1% Pluronic F-68; HyClone) were grown in roller bottles with nucleoside-free HyQ PF CHO liquid soy medium (with 4.0 mM L-Glutamine with 0.1% Pluronic F-68; HyClone) for 7 days. Culture supernatant was cleared from cells by centrifugation and stored at −20° C. until purification. As chromatography equipment for purification of bispecific tandem single chain antibody fragment from culture supernatant Äkta® Explorer System (GE Health Systems) and Unicorn® Software were used. Immobilized metal affinity chromatography (“IMAC”) was performed using a Fractogel EMD chelate® (Merck) which was loaded with ZnCl₂ according to the protocol provided by the manufacturer. The column was equilibrated with buffer A (20 mM sodium phosphate buffer pH 7.2, 0.1 M NaCl) and the cell culture supernatant (500 ml) was applied to the column (10 ml) at a flow rate of 3 ml/min. The column was washed with buffer A to remove unbound sample.

[0986] Bound protein was eluted using a two step gradient of buffer B (20 mM sodium phosphate buffer pH 7.2, 0.1 M NaCl, 0.5 M Imidazole) according to the following:

[0987] Step 1: 20% buffer B in 6 column volumes

[0988] Step 2: 100% buffer B in 6 column volumes

[0989] Eluted protein fractions from step 2 were pooled for further purification. All chemicals are of research grade and purchased from Sigma (Deisenhofen) or Merck (Darmstadt).

[0990] Gel filtration chromatography was performed on a HiLoad 16/60 Superdex 200 prep grade column (GE/Amersham) equilibrated with Equi-buffer (25 mM Citrate, 200 mM Lysine, 5% Glycerol, pH 7.2). Eluted protein samples (flow rate 1 ml/min) were subjected to standard SDS-PAGE and Western Blot for detection. Prior to purification, the column was calibrated for molecular weight determination (molecular weight marker kit, Sigma MW GF-200). Protein concentrations were determined using OD280 nm.

[0991] Purified bispecific tandem single chain antibody fragment was analyzed in SDS

[0992] PAGE under reducing conditions performed with pre-cast 4-12% Bis Tris gels (Invitrogen). Sample preparation and application were performed according to the protocol provided by the manufacturer. The molecular weight was determined with MultiMark protein standard (Invitrogen). The gel was stained with colloidal Coomassie (Invitrogen protocol). The purity of the isolated protein is >95% as determined by SDS-PAGE.

[0993] The bispecific tandem single chain antibody fragment has a molecular weight of about 52 kDa under native conditions as determined by gel filtration in PBS. All constructs were purified according to this method.

[0994] Western Blot was performed using an Optitran® BA-S83 membrane and the

[0995] Invitrogen Blot Module according to the protocol provided by the manufacturer. For detection of the bispecific tandem single chain antibody fragments, an anti-His Tag antibody was used (Penta His, Qiagen). A Goat-anti-mouse Ig antibody labeled with alkaline phosphatase (AP) (Sigma) was used as secondary antibody and BCIP/NBT (Sigma) as substrate. A single band was detected at 52 kD corresponding to the purified bispecific tandem single chain antibody fragment.

[0996] The potency in the human and the non-chimpanzee primate system of bispecific tandem single chain antibody fragments interacting with human and macaque CD3 and with HCV-antigen was determined by a cytotoxicity assay based on chromium 51 (⁵¹Cr) release using HCV-antigen transfected CHO cells as target cells (see Example 40.1) and stimulated human CD4/CD56 depleted PBMC or the macaque T cell line 4119LnPx as effector cells.

[0997] Generation of stimulated human PBMC was performed as follows:

[0998] A Petri dish (85 mm diameter, Nunc) was coated with a commercially available anti-CD3 specific antibody (e.g. OKT3, Othoclone) in a final concentration of 1 μg/ml for 1 hour at 37° C. Unbound protein was removed by one washing step with PBS. The fresh PBMC were isolated from peripheral blood (30-50 ml human blood) by FicoII gradient centrifugation according to standard protocols. 3-5×10⁷ PBMC were added to the precoated petri dish in 50 ml of RPMI 1640 with stabilized glutamine/10% FCS/IL-2 20 U/ml (Proleukin, Chiron) and stimulated for 2 days. On the third day the cells were collected and washed once with RPMI 1640. IL-2 was added to a final concentration of 20 U/ml and the cells were cultivated again for one day in the same cell culture medium as above.

[0999] Target cells were washed twice with PBS and labelled with 11.1 MBq ⁵¹Cr in a final volume of 100 μl RPMI with 50% FCS for 45 minutes at 37° C. Subsequently the labelled target cells were washed 3 times with 5 ml RPMI and then used in the cytotoxicity assay. The assay was performed in a 96 well plate in a total volume of 250 μl supplemented RPMI (as above) with an E:T ratio of 10:1. 1 μg/ml of the cross-species specific bispecific tandem single chain antibody fragments and 20 threefold dilutions thereof were applied. The assay time was 18 hours and cytotoxicity was measured as relative values of released chromium in the supernatant related to the difference of maximum lysis (addition of Triton-X) and spontaneous lysis (without effector cells). All measurements were done in quadruplicates. Measurement of chromium activity in the supernatants was performed with a Wizard 3″ gamma counter (Perkin Elmer Life Sciences GmbH, Köln, Germany). Analysis of the experimental data was performed with Prism 4 for Windows (version 4.02, GraphPad Software Inc., San Diego, Calif., USA). Sigmoidal dose response curves typically have R² values >0.90 as determined by the software. EC₅₀ values as measure of potency were calculated by the analysis program.

1. A polypeptide comprising a binding domain capable of binding to an epitope of human and non-chimpanzee primate CD3ε (epsilon) chain, wherein the epitope is part of an amino acid sequence comprised in the group consisting of SEQ ID NOs. 2, 4, 6, or 8.

2. The polypeptide of claim 1, wherein said binding domain capable of binding to an epitope of the human and non-chimpanzee primate CD3ε (epsilon) chain is of human origin.

3. The polypeptide according to claim 1, wherein the polypeptide comprises a first binding domain capable of binding to an epitope of human and non-chimpanzee primate CD3ε chain and a second binding domain capable of binding to a cell surface antigen.

4. The polypeptide according to claim 3, wherein the second binding domain binds to a cell surface antigen of a human and a non-chimpanzee primate.

5. The polypeptide according to claim 1, wherein the first binding domain capable of binding to an epitope of human and non-chimpanzee primate CD3ε chain comprises a VL region comprising CDR-L1, CDR-L2 and CDR-L3 selected from:
(a) CDR-L1 as depicted in SEQ ID NO. 27, CDR-L2 as depicted in SEQ ID NO. 28 and CDR-L3 as depicted in SEQ ID NO. 29;
(b) CDR-L1 as depicted in SEQ ID NO. 117, CDR-L2 as depicted in SEQ ID NO. 118 and CDR-L3 as depicted in SEQ ID NO. 119; and
(c) CDR-L1 as depicted in SEQ ID NO. 153, CDR-L2 as depicted in SEQ ID NO. 154 and CDR-L3 as depicted in SEQ ID NO. 155.

6. The polypeptide according to claim 1, wherein the first binding domain capable of binding to an epitope of human and non-chimpanzee primate CD3ε chain comprises a VH region comprising CDR-H 1, CDR-H2 and CDR-H3 selected from:
(a) CDR-H1 as depicted in SEQ ID NO. 12, CDR-H2 as depicted in SEQ ID NO. 13 and CDR-H3 as depicted in SEQ ID NO. 14;
(b) CDR-H1 as depicted in SEQ ID NO. 30, CDR-H2 as depicted in SEQ ID NO. 31 and CDR-H3 as depicted in SEQ ID NO. 32;
(c) CDR-H1 as depicted in SEQ ID NO. 48, CDR-H2 as depicted in SEQ ID NO. 49 and CDR-H3 as depicted in SEQ ID NO. 50;
(d) CDR-H1 as depicted in SEQ ID NO. 66, CDR-H2 as depicted in SEQ ID NO. 67 and CDR-H3 as depicted in SEQ ID NO. 68;
(e) CDR-H1 as depicted in SEQ ID NO. 84, CDR-H2 as depicted in SEQ ID NO. 85 and CDR-H3 as depicted in SEQ ID NO. 86;
(f) CDR-H1 as depicted in SEQ ID NO. 102, CDR-H2 as depicted in SEQ ID NO. 103 and CDR-H3 as depicted in SEQ ID NO. 104;
(g) CDR-H1 as depicted in SEQ ID NO. 120, CDR-H2 as depicted in SEQ ID NO. 121 and CDR-H3 as depicted in SEQ ID NO. 122;
(h) CDR-H1 as depicted in SEQ ID NO. 138, CDR-H2 as depicted in SEQ ID NO. 139 and CDR-H3 as depicted in SEQ ID NO. 140;
(i) CDR-H1 as depicted in SEQ ID NO. 156, CDR-H2 as depicted in SEQ ID NO. 157 and CDR-H3 as depicted in SEQ ID NO. 158; and
(j) CDR-H1 as depicted in SEQ ID NO. 174, CDR-H2 as depicted in SEQ ID NO. 175 and CDR-H3 as depicted in SEQ ID NO. 176.

7. The polypeptide according to claim 1, wherein the first binding domain capable of binding to an epitope of human and non-chimpanzee primate CD3ε chain comprises a VL region selected from the group consisting of a VL region as depicted in SEQ ID NO. 35, 39, 125, 129, 161 or 165.

8. The polypeptide according to and claim 1, wherein the binding domain capable of binding to an epitope of human and non-chimpanzee primate CD3ε chain comprises a VH region selected from the group consisting of a VH region as depicted in SEQ ID NO. 15, 19, 33, 37, 51, 55, 69, 73, 87, 91, 105, 109, 123, 127, 141, 145, 159, 163, 177 or 181.

9. The polypeptide according to claim 1, wherein the first binding domain capable of binding to an epitope of human and non-chimpanzee primate CD3ε chain comprises a VL region and a VH region selected from the group consisting of:
(a) a VL region as depicted in SEQ ID NO. 17 or 21 and a VH region as depicted in SEQ ID NO. 15 or 19;
(b) a VL region as depicted in SEQ ID NO. 35 or 39 and a VH region as depicted in SEQ ID NO. 33 or 37;
(c) a VL region as depicted in SEQ ID NO. 53 or 57 and a VH region as depicted in SEQ ID NO. 51 or 55;
(d) a VL region as depicted in SEQ ID NO. 71 or 75 and a VH region as depicted in SEQ ID NO. 69 or 73;
(e) a VL region as depicted in SEQ ID NO. 89 or 93 and a VH region as depicted in SEQ ID NO. 87 or 91;
(f) a VL region as depicted in SEQ ID NO. 107 or 111 and a VH region as depicted in SEQ ID NO. 105 or 109;
(g) a VL region as depicted in SEQ ID NO. 125 or 129 and a VH region as depicted in SEQ ID NO. 123 or 127;
(h) a VL region as depicted in SEQ ID NO. 143 or 147 and a VH region as depicted in SEQ ID NO. 141 or 145;
(i) a VL region as depicted in SEQ ID NO. 161 or 165 and a VH region as depicted in SEQ ID NO. 159 or 163; and
(j) a VL region as depicted in SEQ ID NO. 179 or 183 and a VH region as depicted in SEQ ID NO. 177 or 181.

10. The polypeptide according to claim 9, wherein the first binding domain capable of binding to an epitope of human and non-chimpanzee primate CD3ε chain comprises an amino acid sequence selected from the group consisting of SEQ ID NOs: 23, 25, 41, 43, 59, 61, 77, 79, 95, 97, 113, 115, 131, 133, 149, 151, 167, 169, 185 or 187.

11. The polypeptide according to claim 3, wherein the cell surface antigen is a tumor antigen.

12. The polypeptide according to claim 3, wherein the cell surface antigen is selected from EGFR, EGFRvIII, MCSP, Carbonic anhydrase IX, CD30, CD33, CD44v6, EpCAM, Her2/neu, MUC1, IgE, HBV and HCV.

13. The polypeptide of claim 3, wherein said polypeptide is a bispecific single chain antibody molecule.

14. The polypeptide according to claim 13, wherein the bispecific single chain antibody molecule comprises a group of the following sequences as CDR H1, CDR H2, CDR H3, CDR L1, CDR L2 and CDR L3 in the second binding domain selected from the group consisting of:
SEQ ID NOs: 189-194, SEQ ID NOs: 201-206, SEQ ID NOs: 219-224, SEQ ID NOs: 237-242, SEQ ID NOs:255-260, SEQ ID NOs:273-279, SEQ ID NOs: 382-384 and 387-389, SEQ ID NOs: 400-402 and 405-407, SEQ ID NOs: 418-420 and 423-425, SEQ ID NOs: 436-438 and 441-443, SEQ ID NOs: 454-456 and 459-461, SEQ ID NOs: 472-474 and 477-479, SEQ ID NOs: 490-492 and 495-497, SEQ ID NOs: and 508-510 and 513-515, SEQ ID NOs: 530-532 and 1568 to 1570, SEQ ID NOs: 545-547 and 550-552, SEQ ID NOs: 559-561 and 564-566, SEQ ID NOs: 577-579 and 582-584, SEQ ID NOs: 615-617 and 620-622, SEQ ID NOs: 633-635, 638, 639 and 1571, SEQ ID NOs: 650-652 and 655-657, SEQ ID NOs: 668-670 and 673-675, SEQ ID NOs: 682-684 and 687-689, SEQ ID NOs: 696-698 and 701-703, SEQ ID NOs: 710-712 and 715-717, SEQ ID NOs: 724-726 and 729-731, SEQ ID NOs: 738-740 and 743-745, SEQ ID NOs: 752-754 and 757-759, SEQ ID NOs: 766-768 and 771-773, SEQ ID NOs: 780-782 and 785-787, SEQ ID NOs: 794-796 and 799-801, SEQ ID NOs: 808-810 and 813-815, SEQ ID NOs: 822-824 and 827-829, SEQ ID NOs: 836-838 and 841-843, SEQ ID NOs: 850-852 and 855-857, SEQ ID NOs: 866-868 and 871-873, SEQ ID NOs: 884-886 and 889-891, SEQ ID NOs: 902-904 and 907-909, SEQ ID NOs: 920-922 and 925-927, SEQ ID NOs: 938-940 and 943-945, SEQ ID NOs: 956-958 and 961-963, SEQ ID NOs: 974-976 and 979-981, SEQ ID NOs: 992-994 and 997-999, SEQ ID NOs: 1006-1008 and 1011-1013, SEQ ID NOs: 1020-1022 and 1025-1027, SEQ ID NOs: 1034-1036 and 1039-1041, SEQ ID NOs: 1048-1050 and 1053-1055, SEQ ID NOs: 1062-1064 and 1067-1069, SEQ ID NOs: 1076-1078 and 1081-1083, SEQ ID NOs: 1090-1092 and 1095-1097, SEQ ID NOs: 1114-1116 and 1119-1121, SEQ ID NOs: 1128-1130 and 1133-1135, SEQ ID NOs: 1141-1143 and 1146-1148, SEQ ID NOs: 1155-1157 and 1160-1162, SEQ ID NOs: 1169-1171 and 1174-1176, SEQ ID NOs: 1183-1185 and 1188-1190, SEQ ID NOs: 1197-1199 and 1202-1204, SEQ ID NOs: 1211-1213 and 1216-1218, SEQ ID NOs: 1125-1227 and 1230-1232, SEQ ID NOs: 1239-1241 and 1244-1246, SEQ ID NOs:, 1253-1255 and 1258-1260, SEQ ID NOs: 1267-1269 and 1272-1274, SEQ ID NOs: 1281-1283 and 1286-1288, SEQ ID NOs: 1295-1297 and 1300-1302, SEQ ID NOs: 1309-1311 and 1314-1316, SEQ ID NOs: 1323-1325 and 1328-1330, SEQ ID NOs:1343-1345 and 1348-1350, SEQ ID NOs: 1361-1363 and 1366-1368, SEQ ID NOs:1375-1377 and 1380-1382, SEQ ID NOs: 1389-1391 and 1394-1396, SEQ ID NOs:1403-1405 and 1408-1410, SEQ ID NOs: 1417-1419 and 1422-1424, SEQ ID NOs: 1431-1433 and 1436-1438, SEQ ID NOs:1445-1447 and 1450-1452, SEQ ID NOs:1459-1461 and 1464-1466, SEQ ID NOs: 1473-1475 and 1478-1480, SEQ ID NOs: 1486-1491, SEQ ID NOs: 1492-1497, SEQ ID NOs: 1505-1507 and 1510-1512, SEQ ID NOs: 1531-1533 and 1536-1538, SEQ ID NOs: 1573-1575 and 1578-1580, SEQ ID NOs: 1591-1593 and 1596-1598, SEQ ID NOs: 1605-1607 and 1610-1612, SEQ ID NOs: 1619-1621 and 1624-1626, SEQ ID NOs: 1634-1636 and 1639-1641 and SEQ ID NOs: 1652-1654, SEQ ID NOs: 1657-1659 and SEQ ID NOs: 1669-1674.

15. The polypeptide according to claim 13, wherein the bispecific single chain antibody molecule comprises a sequence selected from:
(a) an amino acid sequence as depicted in any of SEQ ID NOs. 291, 293, 295, 297, 299, 301, 303, 305, 307, 309, 311, 313, 315, 317, 319, 321, 323, 325, 327, 329, 331, 333, 335, 337, 339,341, 343, 345, 347, 393, 395,397, 411, 413, 415, 429, 431, 433, 447, 449, 451, 465, 467, 469, 483, 485, 487, 501, 503, 505, 519, 521, 523, 1336, 1338, 1340, 538, 540, 542, 556, 570, 572, 574, 588, 590, 592, 626, 628, 630, 643, 645, 647, 661, 663, 665, 679, 693, 707, 721, 735, 749, 763, 777, 791, 805, 819, 833, 847, 861, 863, 877, 879, 881, 895, 897, 899, 913, 915, 917, 931, 933, 935, 949, 951, 953, 967, 969, 971, 985, 987, 989, 1003, 1017, 1031, 1045, 1059, 1073, 1087, 1101, 1125, 1138, 1152, 1166, 1180, 1194, 1208, 1222, 1236, 1250, 1264, 1278, 1292, 1306, 1320, 1334, 1354, 1356, 1358, 1372, 1386, 1400, 1414, 1428, 1442, 1456, 1470, 1484, 1500, 1502, 1518, 1520, 1522, 1524, 1526, 1528, 1544, 1546, 1548, 1550, 1552, 1554, 1556, 1558, 1560, 1562, 1564, 1566, 1586, 1588, 1602, 1616, 1630, 1647, 1649 or 1663; and
(b) an amino acid sequence encoded by a nucleic acid sequence as depicted in any of SEQ ID NOs. 292, 294, 296, 298, 300, 302, 304, 306, 308, 310, 312, 314, 316, 318, 320, 322, 324, 326, 328, 330, 332, 334, 336, 338, 340, 342, 344, 346, 348, 394, 396, 398, 412, 414, 416, 430, 432, 434, 448, 450, 452, 466, 468, 470, 484, 486, 488, 502, 504, 506, 520, 522, 524, 1337, 1339, 1341, 539, 541, 543, 557, 571, 573, 575, 589, 591, 593, 627, 629, 631, 644, 646, 648, 662, 664, 666, 680, 694, 708, 722, 736, 750, 764, 778, 792, 806, 820, 834, 848, 862, 864, 878, 880, 882, 896, 898, 900, 914, 916, 918, 932, 934, 936, 950, 952, 954, 968, 970, 972, 986, 988, 990, 1004, 1018, 1032, 1046, 1060, 1074, 1088, 1102, 1126, 1139, 1153, 1167, 1181, 1195, 1209, 1223, 1237, 1251, 1265, 1279, 1293, 1307, 1321, 1335, 1355, 1357, 1359, 1373, 1387, 1401, 1415, 1429, 1443, 1457, 1471, 1485, 1501, 1503, 1519, 1521, 1523, 1525, 1527, 1529, 1545, 1547, 1549, 1551, 1553, 1555, 1557, 1559, 1561, 1563, 1565, 1567, 1587, 1589, 1603, 1617, 1631, 1648, 1650 or 1664.

16. A nucleic acid sequence encoding a polypeptide as defined in claim 1.

17. A vector, which comprises a nucleic acid sequence as defined in claim 16.

18.-23. (canceled)

24. A pharmaceutical composition comprising a polypeptide according to claim 1 for the prevention, treatment or amelioration of a disease selected from a proliferative disease, a tumorous disease, or an immunological disorder.

25.-30. (canceled)

31. A method for the prevention, treatment or amelioration of a disease in a subject in the need thereof, said method comprising the step of administration of an effective amount of a pharmaceutical composition comprising a polypeptide according to claim 1.

32.-38. (canceled)

39. A method for the identification of (a) polypeptide(s) comprising a cross-species specific binding domain capable of binding to an epitope of human and non-chimpanzee primate CD3e (CD3 epsilon), the method comprising the steps of:
(a) contacting the polypeptide(s) with an N-terminal fragment of the extracellular domain of CD3ε of maximal 27 amino acids comprising the amino acid sequence Gln-Asp-Gly-Asn-Glu-Glu-Met-Gly (SEQ ID NO. 381) or Gln-Asp-Gly-Asn-Glu-Glu-Ile-Gly (SEQ ID NO.382), fixed via its C-terminus to a solid phase;
(b) eluting the bound polypeptide(s) from said fragment; and
(c) isolating the polypeptide(s) from the eluate of (b).

40. (canceled)

The application's sequence listing, which the Patent Office published only in electronic form, follows.

SEQUENCE LISTING (1674 sequences)

SEQ ID NO: 1 - protein, 105 aa, Artificial
  unknown organism
QDGNEEMGGITQTPYKVSISGTTVILTCPQYPGSEILWQHNDKNIGGDEDDKNIGSDEDHLSLKEFSELEQSGYYVCYPRGSKPEDANFYLYLRARVCENCMEMD

SEQ ID NO: 2 - protein, 27 aa, Artificial
  unknown organism
QDGNEEMGGITQTPYKVSISGTTVILT

SEQ ID NO: 3 - protein, 96 aa, Artificial
  unknown organism
QDGNEEMGDTTQNPYKVSISGTTVTLTCPRYDGHEIKWLVNSQNKEGHEDHLLLEDFSEMEQSGYYACLSKETPAEEASHYLYLKARVCENCVEVD

SEQ ID NO: 4 - protein, 27 aa, Artificial
  unknown organism
QDGNEEMGDTTQNPYKVSISGTTVTLT

SEQ ID NO: 5 - protein, 96 aa, Artificial; identical to SEQ ID NO: 3
  unknown organism

SEQ ID NO: 6 - protein, 27 aa, Artificial
  unknown organism
QDGNEEMGDTTQNPYKVSISGTTVTLT

SEQ ID NO: 7 - protein, 96 aa, Artificial
  unknown organism
QDGNEEIGDTTQNPYKVSISGTTVTLTCPRYDGQEIKWLVNDQNKEGHEDHLLLEDFSEMEQSGYYACLSKETPTEEASHYLYLKARVCENCVEVD

SEQ ID NO: 8 - protein, 27 aa, Artificial
  unknown organism
QDGNEEIGDTTQNPYKVSISGTTVTLT

SEQ ID NO: 9 - protein, 14 aa, Artificial
  unknown organism
GSSTGAVTSGYYPN

SEQ ID NO: 10 - protein, 7 aa, Artificial
  unknown organism
GTKFLAP

SEQ ID NO: 11 - protein, 9 aa, Artificial
  unknown organism
ALWYSNRWV

SEQ ID NO: 12 - protein, 5 aa, Artificial
  unknown organism
IYAMN

SEQ ID NO: 13 - protein, 19 aa, Artificial
  unknown organism
RIRSKYNNYATYYADSVKS

SEQ ID NO: 14 - protein, 14 aa, Artificial
  unknown organism
HGNFGNSYVSFFAY

SEQ ID NO: 15 - protein, 125 aa, Artificial
  unknown organism
EVQLVESGGGLVQPGGSLKLSCAASGFTFNIYAMNWVRQAPGKGLEWVARIRSKYNNYATYYADSVKSRFTISRDDSKNTAYLQMNNLKTEDTAVYYCVRHGNFGNSYVSFFAYWGQGTLVTVSS

SEQ ID NO: 16 - DNA, 375 bp, Artificial
  unknown organism
gaggtgcagctggtcgagtctggaggaggattggtgcagcctggagggtcattgaaactctcatgtgcagcctctggattcaccttcaatatctacgccatgaactgggtccgccaggctccaggaaagggtttggaatgggttgctcgcataagaagtaaatataataattatgcaacatattatgccgattcagtgaaaagcaggttcaccatctccagagatgattcaaaaaacactgcctatctacaaatgaacaacttgaaaactgaggacactgccgtgtactactgtgtgagacatgggaacttcggtaatagctacgtatccttcttcgcttactggggccaagggactctggtcaccgtctcctca

SEQ ID NO: 17 - protein, 109 aa, Artificial
  unknown organism
QTVVTQEPSLTVSPGGTVTLTCGSSTGAVTSGYYPNWVQQKPGQAPRGLIGGTKFLAPGTPARFSGSLLGGKAALTLSGVQPEDEAEYYCALWYSNRWVFGGGTKLTVL

SEQ ID NO: 18 - DNA, 327 bp, Artificial
  unknown organism
cagactgttgtgactcaggaaccttcactcaccgtatcacctggtggaacagtcacactcacttgtggctcctcgactggggctgttacatctggctactacccaaactgggtccaacaaaaaccaggtcaggcaccccgtggtctaataggtgggactaagttcctcgcccccggtactcctgccagattctcaggctccctgcttggaggcaaggctgccctcaccctctcaggggtacagccagaggatgaggcagaatattactgtgctctatggtacagcaaccgctgggtgttcggtggaggaaccaaactgactgtccta

SEQ ID NO: 19 - protein, 125 aa, Artificial
  unknown organism
EVQLLESGGGLVQPGGSLKLSCAASGFTFNIYAMNWVRQAPGKGLEWVARIRSKYNNYATYYADSVKSRFTISRDDSKNTAYLQMNNLKTEDTAVYYCVRHGNFGNSYVSFFAYWGQGTLVTVSS

SEQ ID NO: 20 - DNA, 375 bp, Artificial
  unknown organism
gaggtgcagctgctcgagtctggaggaggattggtgcagcctggagggtcattgaaactctcatgtgcagcctctggattcaccttcaatatctacgccatgaactgggtccgccaggctccaggaaagggtttggaatgggttgctcgcataagaagtaaatataataattatgcaacatattatgccgattcagtgaaaagcaggttcaccatctccagagatgattcaaaaaacactgcctatctacaaatgaacaacttgaaaactgaggacactgccgtgtactactgtgtgagacatgggaacttcggtaatagctacgtatccttcttcgcttactggggccaagggactctggtcaccgtctcctca

SEQ ID NO: 21 - protein, 109 aa, Artificial
  unknown organism
ELVVTQEPSLTVSPGGTVTLTCGSSTGAVTSGYYPNWVQQKPGQAPRGLIGGTKFLAPGTPARFSGSLLGGKAALTLSGVQPEDEAEYYCALWYSNRWVFGGGTKLTVL

SEQ ID NO: 22 - DNA, 327 bp, Artificial
  unknown organism
gagctcgttgtgactcaggaaccttcactcaccgtatcacctggtggaacagtcacactcacttgtggctcctcgactggggctgttacatctggctactacccaaactgggtccaacaaaaaccaggtcaggcaccccgtggtctaataggtgggactaagttcctcgcccccggtactcctgccagattctcaggctccctgcttggaggcaaggctgccctcaccctctcaggggtacagccagaggatgaggcagaatattactgtgctctatggtacagcaaccgctgggtgttcggtggaggaaccaaactgactgtccta

SEQ ID NO: 23 - protein, 249 aa, Artificial
  unknown organism
EVQLVESGGGLVQPGGSLKLSCAASGFTFNIYAMNWVRQAPGKGLEWVARIRSKYNNYATYYADSVKSRFTISRDDSKNTAYLQMNNLKTEDTAVYYCVRHGNFGNSYVSFFAYWGQGTLVTVSSGGGGSGGGGSGGGGSQTVVTQEPSLTVSPGGTVTLTCGSSTGAVTSGYYPNWVQQKPGQAPRGLIGGTKFLAPGTPARFSGSLLGGKAALTLSGVQPEDEAEYYCALWYSNRWVFGGGTKLTVL

SEQ ID NO: 24 - DNA, 747 bp, Artificial
  unknown organism
gaggtgcagctggtcgagtctggaggaggattggtgcagcctggagggtcattgaaactctcatgtgcagcctctggattcaccttcaatatctacgccatgaactgggtccgccaggctccaggaaagggtttggaatgggttgctcgcataagaagtaaatataataattatgcaacatattatgccgattcagtgaaaagcaggttcaccatctccagagatgattcaaaaaacactgcctatctacaaatgaacaacttgaaaactgaggacactgccgtgtactactgtgtgagacatgggaacttcggtaatagctacgtatccttcttcgcttactggggccaagggactctggtcaccgtctcctcaggtggtggtggttctggcggcggcggctccggtggtggtggttctcagactgttgtgactcaggaaccttcactcaccgtatcacctggtggaacagtcacactcacttgtggctcctcgactggggctgttacatctggctactacccaaactgggtccaacaaaaaccaggtcaggcaccccgtggtctaataggtgggactaagttcctcgcccccggtactcctgccagattctcaggctccctgcttggaggcaaggctgccctcaccctctcaggggtacagccagaggatgaggcagaatattactgtgctctatggtacagcaaccgctgggtgttcggtggaggaaccaaactgactgtccta

SEQ ID NO: 25 - protein, 249 aa, Artificial
  unknown organism
EVQLLESGGGLVQPGGSLKLSCAASGFTFNIYAMNWVRQAPGKGLEWVARIRSKYNNYATYYADSVKSRFTISRDDSKNTAYLQMNNLKTEDTAVYYCVRHGNFGNSYVSFFAYWGQGTLVTVSSGGGGSGGGGSGGGGSELVVTQEPSLTVSPGGTVTLTCGSSTGAVTSGYYPNWVQQKPGQAPRGLIGGTKFLAPGTPARFSGSLLGGKAALTLSGVQPEDEAEYYCALWYSNRWVFGGGTKLTVL

SEQ ID NO: 26 - DNA, 747 bp, Artificial
  unknown organism
gaggtgcagctgctcgagtctggaggaggattggtgcagcctggagggtcattgaaactctcatgtgcagcctctggattcaccttcaatatctacgccatgaactgggtccgccaggctccaggaaagggtttggaatgggttgctcgcataagaagtaaatataataattatgcaacatattatgccgattcagtgaaaagcaggttcaccatctccagagatgattcaaaaaacactgcctatctacaaatgaacaacttgaaaactgaggacactgccgtgtactactgtgtgagacatgggaacttcggtaatagctacgtatccttcttcgcttactggggccaagggactctggtcaccgtctcctcaggtggtggtggttctggcggcggcggctccggtggtggtggttctgagctcgttgtgactcaggaaccttcactcaccgtatcacctggtggaacagtcacactcacttgtggctcctcgactggggctgttacatctggctactacccaaactgggtccaacaaaaaccaggtcaggcaccccgtggtctaataggtgggactaagttcctcgcccccggtactcctgccagattctcaggctccctgcttggaggcaaggctgccctcaccctctcaggggtacagccagaggatgaggcagaatattactgtgctctatggtacagcaaccgctgggtgttcggtggaggaaccaaactgactgtccta

SEQ ID NO: 27 - protein, 14 aa, Artificial
  unknown organism
GSSTGAVTSGYYPN

SEQ ID NO: 28 - protein, 7 aa, Artificial
  unknown organism
GTKFLAP

SEQ ID NO: 29 - protein, 9 aa, Artificial
  unknown organism
ALWYSNRWV

SEQ ID NO: 30 - protein, 5 aa, Artificial
  unknown organism
KYAMN

SEQ ID NO: 31 - protein, 19 aa, Artificial
  unknown organism
RIRSKYNNYATYYADSVKD

SEQ ID NO: 32 - protein, 14 aa, Artificial
  unknown organism
HGNFGNSYISYWAY

SEQ ID NO: 33 - protein, 125 aa, Artificial
  unknown organism
EVQLVESGGGLVQPGGSLKLSCAASGFTFNKYAMNWVRQAPGKGLEWVARIRSKYNNYATYYADSVKDRFTISRDDSKNTAYLQMNNLKTEDTAVYYCVRHGNFGNSYISYWAYWGQGTLVTVSS

SEQ ID NO: 34 - DNA, 375 bp, Artificial
  unknown organism
gaggtgcagctggtcgagtctggaggaggattggtgcagcctggagggtcattgaaactctcatgtgcagcctctggattcaccttcaataagtacgccatgaactgggtccgccaggctccaggaaagggtttggaatgggttgctcgcataagaagtaaatataataattatgcaacatattatgccgattcagtgaaagacaggttcaccatctccagagatgattcaaaaaacactgcctatctacaaatgaacaacttgaaaactgaggacactgccgtgtactactgtgtgagacatgggaacttcggtaatagctacatatcctactgggcttactggggccaagggactctggtcaccgtctcctca

SEQ ID NO: 35 - protein, 109 aa, Artificial; identical to SEQ ID NO: 17
  unknown organism

SEQ ID NO: 36 - DNA, 327 bp, Artificial; identical to SEQ ID NO: 18
  unknown organism

SEQ ID NO: 37 - protein, 125 aa, Artificial
  unknown organism
EVQLLESGGGLVQPGGSLKLSCAASGFTFNKYAMNWVRQAPGKGLEWVARIRSKYNNYATYYADSVKDRFTISRDDSKNTAYLQMNNLKTEDTAVYYCVRHGNFGNSYISYWAYWGQGTLVTVSS

SEQ ID NO: 38 - DNA, 375 bp, Artificial
  unknown organism
gaggtgcagctgctcgagtctggaggaggattggtgcagcctggagggtcattgaaactctcatgtgcagcctctggattcaccttcaataagtacgccatgaactgggtccgccaggctccaggaaagggtttggaatgggttgctcgcataagaagtaaatataataattatgcaacatattatgccgattcagtgaaagacaggttcaccatctccagagatgattcaaaaaacactgcctatctacaaatgaacaacttgaaaactgaggacactgccgtgtactactgtgtgagacatgggaacttcggtaatagctacatatcctactgggcttactggggccaagggactctggtcaccgtctcctca

SEQ ID NO: 39 - protein, 109 aa, Artificial; identical to SEQ ID NO: 21
  unknown organism

SEQ ID NO: 40 - DNA, 327 bp, Artificial; identical to SEQ ID NO: 22
  unknown organism

SEQ ID NO: 41 - protein, 249 aa, Artificial
  unknown organism
EVQLVESGGGLVQPGGSLKLSCAASGFTFNKYAMNWVRQAPGKGLEWVARIRSKYNNYATYYADSVKDRFTISRDDSKNTAYLQMNNLKTEDTAVYYCVRHGNFGNSYISYWAYWGQGTLVTVSSGGGGSGGGGSGGGGSQTVVTQEPSLTVSPGGTVTLTCGSSTGAVTSGYYPNWVQQKPGQAPRGLIGGTKFLAPGTPARFSGSLLGGKAALTLSGVQPEDEAEYYCALWYSNRWVFGGGTKLTVL

SEQ ID NO: 42 - DNA, 747 bp, Artificial
  unknown organism
gaggtgcagctggtcgagtctggaggaggattggtgcagcctggagggtcattgaaactctcatgtgcagcctctggattcaccttcaataagtacgccatgaactgggtccgccaggctccaggaaagggtttggaatgggttgctcgcataagaagtaaatataataattatgcaacatattatgccgattcagtgaaagacaggttcaccatctccagagatgattcaaaaaacactgcctatctacaaatgaacaacttgaaaactgaggacactgccgtgtactactgtgtgagacatgggaacttcggtaatagctacatatcctactgggcttactggggccaagggactctggtcaccgtctcctcaggtggtggtggttctggcggcggcggctccggtggtggtggttctcagactgttgtgactcaggaaccttcactcaccgtatcacctggtggaacagtcacactcacttgtggctcctcgactggggctgttacatctggctactacccaaactgggtccaacaaaaaccaggtcaggcaccccgtggtctaataggtgggactaagttcctcgcccccggtactcctgccagattctcaggctccctgcttggaggcaaggctgccctcaccctctcaggggtacagccagaggatgaggcagaatattactgtgctctatggtacagcaaccgctgggtgttcggtggaggaaccaaactgactgtccta

SEQ ID NO: 43 - protein, 249 aa, Artificial
  unknown organism
EVQLLESGGGLVQPGGSLKLSCAASGFTFNKYAMNWVRQAPGKGLEWVARIRSKYNNYATYYADSVKDRFTISRDDSKNTAYLQMNNLKTEDTAVYYCVRHGNFGNSYISYWAYWGQGTLVTVSSGGGGSGGGGSGGGGSELVVTQEPSLTVSPGGTVTLTCGSSTGAVTSGYYPNWVQQKPGQAPRGLIGGTKFLAPGTPARFSGSLLGGKAALTLSGVQPEDEAEYYCALWYSNRWVFGGGTKLTVL

SEQ ID NO: 44 - DNA, 747 bp, Artificial
  unknown organism
gaggtgcagctgctcgagtctggaggaggattggtgcagcctggagggtcattgaaactctcatgtgcagcctctggattcaccttcaataagtacgccatgaactgggtccgccaggctccaggaaagggtttggaatgggttgctcgcataagaagtaaatataataattatgcaacatattatgccgattcagtgaaagacaggttcaccatctccagagatgattcaaaaaacactgcctatctacaaatgaacaacttgaaaactgaggacactgccgtgtactactgtgtgagacatgggaacttcggtaatagctacatatcctactgggcttactggggccaagggactctggtcaccgtctcctcaggtggtggtggttctggcggcggcggctccggtggtggtggttctgagctcgttgtgactcaggaaccttcactcaccgtatcacctggtggaacagtcacactcacttgtggctcctcgactggggctgttacatctggctactacccaaactgggtccaacaaaaaccaggtcaggcaccccgtggtctaataggtgggactaagttcctcgcccccggtactcctgccagattctcaggctccctgcttggaggcaaggctgccctcaccctctcaggggtacagccagaggatgaggcagaatattactgtgctctatggtacagcaaccgctgggtgttcggtggaggaaccaaactgactgtccta

SEQ ID NO: 45 - protein, 14 aa, Artificial
  unknown organism
GSSTGAVTSGYYPN

SEQ ID NO: 46 - protein, 7 aa, Artificial
  unknown organism
GTKFLAP

SEQ ID NO: 47 - protein, 9 aa, Artificial
  unknown organism
ALWYSNRWV

SEQ ID NO: 48 - protein, 5 aa, Artificial
  unknown organism
SYAMN

SEQ ID NO: 49 - protein, 19 aa, Artificial
  unknown organism
RIRSKYNNYATYYADSVKG

SEQ ID NO: 50 - protein, 14 aa, Artificial
  unknown organism
HGNFGNSYLSFWAY

SEQ ID NO: 51 - protein, 125 aa, Artificial
  unknown organism
EVQLVESGGGLEQPGGSLKLSCAASGFTFNSYAMNWVRQAPGKGLEWVARIRSKYNNYATYYADSVKGRFTISRDDSKNTAYLQMNNLKTEDTAVYYCVRHGNFGNSYLSFWAYWGQGTLVTVSS

SEQ ID NO: 52 - DNA, 374 bp, Artificial
  unknown organism
gaggtgcagctggtcgagtctggaggaggattggagcagcctggagggtcattgaaactctcatgtgcagcctctggattcaccttcaattcgtacgccatgaactgggtccgccaggctccaggaaagggtttggaatgggttgctcgcataagaagtaaatataataattatgcaacatattatgccgattcagtgaaagggaggttcaccatctccagagatgattcaaaaaacactgcctatctacaaatgaacaacttgaaaactgaggacactgccgtgtactactgtgtgagacatgggaacttcggtaatagctacctatccttctgggcttactggggccaagggactctggtcaccgtctcctc

SEQ ID NO: 53 - protein, 109 aa, Artificial; identical to SEQ ID NO: 17
  unknown organism

SEQ ID NO: 54 - DNA, 327 bp, Artificial; identical to SEQ ID NO: 18
  unknown organism

SEQ ID NO: 55 - protein, 125 aa, Artificial
  unknown organism
EVQLLESGGGLEQPGGSLKLSCAASGFTFNSYAMNWVRQAPGKGLEWVARIRSKYNNYATYYADSVKGRFTISRDDSKNTAYLQMNNLKTEDTAVYYCVRHGNFGNSYLSFWAYWGQGTLVTVSS

SEQ ID NO: 56 - DNA, 375 bp, Artificial
  unknown organism
gaggtgcagctgctcgagtctggaggaggattggagcagcctggagggtcattgaaactctcatgtgcagcctctggattcaccttcaattcgtacgccatgaactgggtccgccaggctccaggaaagggtttggaatgggttgctcgcataagaagtaaatataataattatgcaacatattatgccgattcagtgaaagggaggttcaccatctccagagatgattcaaaaaacactgcctatctacaaatgaacaacttgaaaactgaggacactgccgtgtactactgtgtgagacatgggaacttcggtaatagctacctatccttctgggcttactggggccaagggactctggtcaccgtctcctca

SEQ ID NO: 57 - protein, 109 aa, Artificial; identical to SEQ ID NO: 21
  unknown organism

SEQ ID NO: 58 - DNA, 327 bp, Artificial; identical to SEQ ID NO: 22
  unknown organism

SEQ ID NO: 59 - protein, 249 aa, Artificial
  unknown organism
EVQLVESGGGLEQPGGSLKLSCAASGFTFNSYAMNWVRQAPGKGLEWVARIRSKYNNYATYYADSVKGRFTISRDDSKNTAYLQMNNLKTEDTAVYYCVRHGNFGNSYLSFWAYWGQGTLVTVSSGGGGSGGGGSGGGGSQTVVTQEPSLTVSPGGTVTLTCGSSTGAVTSGYYPNWVQQKPGQAPRGLIGGTKFLAPGTPARFSGSLLGGKAALTLSGVQPEDEAEYYCALWYSNRWVFGGGTKLTVL

SEQ ID NO: 60 - DNA, 747 bp, Artificial
  unknown organism
gaggtgcagctggtcgagtctggaggaggattggagcagcctggagggtcattgaaactctcatgtgcagcctctggattcaccttcaattcgtacgccatgaactgggtccgccaggctccaggaaagggtttggaatgggttgctcgcataagaagtaaatataataattatgcaacatattatgccgattcagtgaaagggaggttcaccatctccagagatgattcaaaaaacactgcctatctacaaatgaacaacttgaaaactgaggacactgccgtgtactactgtgtgagacatgggaacttcggtaatagctacctatccttctgggcttactggggccaagggactctggtcaccgtctcctcaggtggtggtggttctggcggcggcggctccggtggtggtggttctcagactgttgtgactcaggaaccttcactcaccgtatcacctggtggaacagtcacactcacttgtggctcctcgactggggctgttacatctggctactacccaaactgggtccaacaaaaaccaggtcaggcaccccgtggtctaataggtgggactaagttcctcgcccccggtactcctgccagattctcaggctccctgcttggaggcaaggctgccctcaccctctcaggggtacagccagaggatgaggcagaatattactgtgctctatggtacagcaaccgctgggtgttcggtggaggaaccaaactgactgtccta

SEQ ID NO: 61 - protein, 249 aa, Artificial
  unknown organism
EVQLLESGGGLEQPGGSLKLSCAASGFTFNSYAMNWVRQAPGKGLEWVARIRSKYNNYATYYADSVKGRFTISRDDSKNTAYLQMNNLKTEDTAVYYCVRHGNFGNSYLSFWAYWGQGTLVTVSSGGGGSGGGGSGGGGSELVVTQEPSLTVSPGGTVTLTCGSSTGAVTSGYYPNWVQQKPGQAPRGLIGGTKFLAPGTPARFSGSLLGGKAALTLSGVQPEDEAEYYCALWYSNRWVFGGGTKLTVL

SEQ ID NO: 62 - DNA, 747 bp, Artificial
  unknown organism
gaggtgcagctgctcgagtctggaggaggattggagcagcctggagggtcattgaaactctcatgtgcagcctctggattcaccttcaattcgtacgccatgaactgggtccgccaggctccaggaaagggtttggaatgggttgctcgcataagaagtaaatataataattatgcaacatattatgccgattcagtgaaagggaggttcaccatctccagagatgattcaaaaaacactgcctatctacaaatgaacaacttgaaaactgaggacactgccgtgtactactgtgtgagacatgggaacttcggtaatagctacctatccttctgggcttactggggccaagggactctggtcaccgtctcctcaggtggtggtggttctggcggcggcggctccggtggtggtggttctgagctcgttgtgactcaggaaccttcactcaccgtatcacctggtggaacagtcacactcacttgtggctcctcgactggggctgttacatctggctactacccaaactgggtccaacaaaaaccaggtcaggcaccccgtggtctaataggtgggactaagttcctcgcccccggtactcctgccagattctcaggctccctgcttggaggcaaggctgccctcaccctctcaggggtacagccagaggatgaggcagaatattactgtgctctatggtacagcaaccgctgggtgttcggtggaggaaccaaactgactgtccta

SEQ ID NO: 63 - protein, 14 aa, Artificial
  unknown organism
GSSTGAVTSGYYPN

SEQ ID NO: 64 - protein, 7 aa, Artificial
  unknown organism
GTKFLAP

SEQ ID NO: 65 - protein, 9 aa, Artificial
  unknown organism
ALWYSNRWV

SEQ ID NO: 66 - protein, 5 aa, Artificial
  unknown organism
RYAMN

SEQ ID NO: 67 - protein, 19 aa, Artificial
  unknown organism
RIRSKYNNYATYYADSVKG

SEQ ID NO: 68 - protein, 14 aa, Artificial
  unknown organism
HGNFGNSYLSYFAY

SEQ ID NO: 69 - protein, 125 aa, Artificial
  unknown organism
EVQLVESGGGLVQPGGSLKLSCAASGFTFNRYAMNWVRQAPGKGLEWVARIRSKYNNYATYYADSVKGRFTISRDDSKNTAYLQMNNLKTEDTAVYYCVRHGNFGNSYLSYFAYWGQGTLVTVSS

SEQ ID NO: 70 - DNA, 375 bp, Artificial
  unknown organism
gaggtgcagctggtcgagtctggaggaggattggtgcagcctggagggtcattgaaactctcatgtgcagcctctggattcaccttcaatcgctacgccatgaactgggtccgccaggctccaggaaagggtttggaatgggttgctcgcataagaagtaaatataataattatgcaacatattatgccgattcagtgaaagggaggttcaccatctccagagatgattcaaaaaacactgcctatctacaaatgaacaacttgaaaactgaggacactgccgtgtactactgtgtgagacatgggaacttcggtaatagctacttatcctacttcgcttactggggccaagggactctggtcaccgtctcctca

SEQ ID NO: 71 - protein, 109 aa, Artificial; identical to SEQ ID NO: 17
  unknown organism

SEQ ID NO: 72 - DNA, 327 bp, Artificial; identical to SEQ ID NO: 18
  unknown organism

SEQ ID NO: 73 - protein, 125 aa, Artificial
  unknown organism
EVQLLESGGGLVQPGGSLKLSCAASGFTFNRYAMNWVRQAPGKGLEWVARIRSKYNNYATYYADSVKGRFTISRDDSKNTAYLQMNNLKTEDTAVYYCVRHGNFGNSYLSYFAYWGQGTLVTVSS

SEQ ID NO: 74 - DNA, 375 bp, Artificial
  unknown organism
gaggtgcagctgctcgagtctggaggaggattggtgcagcctggagggtcattgaaactctcatgtgcagcctctggattcaccttcaatcgctacgccatgaactgggtccgccaggctccaggaaagggtttggaatgggttgctcgcataagaagtaaatataataattatgcaacatattatgccgattcagtgaaagggaggttcaccatctccagagatgattcaaaaaacactgcctatctacaaatgaacaacttgaaaactgaggacactgccgtgtactactgtgtgagacatgggaacttcggtaatagctacttatcctacttcgcttactggggccaagggactctggtcaccgtctcctca

SEQ ID NO: 75 - protein, 109 aa, Artificial; identical to SEQ ID NO: 21
  unknown organism

SEQ ID NO: 76 - DNA, 327 bp, Artificial; identical to SEQ ID NO: 22
  unknown organism

SEQ ID NO: 77 - protein, 249 aa, Artificial
  unknown organism
EVQLVESGGGLVQPGGSLKLSCAASGFTFNRYAMNWVRQAPGKGLEWVARIRSKYNNYATYYADSVKGRFTISRDDSKNTAYLQMNNLKTEDTAVYYCVRHGNFGNSYLSYFAYWGQGTLVTVSSGGGGSGGGGSGGGGSQTVVTQEPSLTVSPGGTVTLTCGSSTGAVTSGYYPNWVQQKPGQAPRGLIGGTKFLAPGTPARFSGSLLGGKAALTLSGVQPEDEAEYYCALWYSNRWVFGGGTKLTVL

SEQ ID NO: 78 - DNA, 747 bp, Artificial
  unknown organism
gaggtgcagctggtcgagtctggaggaggattggtgcagcctggagggtcattgaaactctcatgtgcagcctctggattcaccttcaatcgctacgccatgaactgggtccgccaggctccaggaaagggtttggaatgggttgctcgcataagaagtaaatataataattatgcaacatattatgccgattcagtgaaagggaggttcaccatctccagagatgattcaaaaaacactgcctatctacaaatgaacaacttgaaaactgaggacactgccgtgtactactgtgtgagacatgggaacttcggtaatagctacttatcctacttcgcttactggggccaagggactctggtcaccgtctcctcaggtggtggtggttctggcggcggcggctccggtggtggtggttctcagactgttgtgactcaggaaccttcactcaccgtatcacctggtggaacagtcacactcacttgtggctcctcgactggggctgttacatctggctactacccaaactgggtccaacaaaaaccaggtcaggcaccccgtggtctaataggtgggactaagttcctcgcccccggtactcctgccagattctcaggctccctgcttggaggcaaggctgccctcaccctctcaggggtacagccagaggatgaggcagaatattactgtgctctatggtacagcaaccgctgggtgttcggtggaggaaccaaactgactgtccta

SEQ ID NO: 79 - protein, 249 aa, Artificial
  unknown organism
EVQLLESGGGLVQPGGSLKLSCAASGFTFNRYAMNWVRQAPGKGLEWVARIRSKYNNYATYYADSVKGRFTISRDDSKNTAYLQMNNLKTEDTAVYYCVRHGNFGNSYLSYFAYWGQGTLVTVSSGGGGSGGGGSGGGGSELVVTQEPSLTVSPGGTVTLTCGSSTGAVTSGYYPNWVQQKPGQAPRGLIGGTKFLAPGTPARFSGSLLGGKAALTLSGVQPEDEAEYYCALWYSNRWVFGGGTKLTVL

SEQ ID NO: 80 - DNA, 747 bp, Artificial
  unknown organism
gaggtgcagctgctcgagtctggaggaggattggtgcagcctggagggtcattgaaactctcatgtgcagcctctggattcaccttcaatcgctacgccatgaactgggtccgccaggctccaggaaagggtttggaatgggttgctcgcataagaagtaaatataataattatgcaacatattatgccgattcagtgaaagggaggttcaccatctccagagatgattcaaaaaacactgcctatctacaaatgaacaacttgaaaactgaggacactgccgtgtactactgtgtgagacatgggaacttcggtaatagctacttatcctacttcgcttactggggccaagggactctggtcaccgtctcctcaggtggtggtggttctggcggcggcggctccggtggtggtggttctgagctcgttgtgactcaggaaccttcactcaccgtatcacctggtggaacagtcacactcacttgtggctcctcgactggggctgttacatctggctactacccaaactgggtccaacaaaaaccaggtcaggcaccccgtggtctaataggtgggactaagttcctcgcccccggtactcctgccagattctcaggctccctgcttggaggcaaggctgccctcaccctctcaggggtacagccagaggatgaggcagaatattactgtgctctatggtacagcaaccgctgggtgttcggtggaggaaccaaactgactgtccta

SEQ ID NO: 81 - protein, 14 aa, Artificial
  unknown organism
RSSTGAVTSGYYPN

SEQ ID NO: 82 - protein, 7 aa, Artificial
  unknown organism
ATDMRPS

SEQ ID NO: 83 - protein, 9 aa, Artificial
  unknown organism
ALWYSNRWV

SEQ ID NO: 84 - protein, 5 aa, Artificial
  unknown organism
VYAMN

SEQ ID NO: 85 - protein, 19 aa, Artificial
  unknown organism
RIRSKYNNYATYYADSVKK

SEQ ID NO: 86 - protein, 14 aa, Artificial
  unknown organism
HGNFGNSYLSWWAY

SEQ ID NO: 87 - protein, 125 aa, Artificial
  unknown organism
EVQLVESGGGLVQPGGSLKLSCAASGFTFNVYAMNWVRQAPGKGLEWVARIRSKYNNYATYYADSVKKRFTISRDDSKNTAYLQMNNLKTEDTAVYYCVRHGNFGNSYLSWWAYWGQGTLVTVSS

SEQ ID NO: 88 - DNA, 375 bp, Artificial
  unknown organism
gaggtgcagctggtcgagtctggaggaggattggtgcagcctggagggtcattgaaactctcatgtgcagcctctggattcaccttcaatgtctacgccatgaactgggtccgccaggctccaggaaagggtttggaatgggttgctcgcataagaagtaaatataataattatgcaacatattatgccgattcagtgaaaaagaggttcaccatctccagagatgattcaaaaaacactgcctatctacaaatgaacaacttgaaaactgaggacactgccgtgtactactgtgtgagacatgggaacttcggtaatagctacttatcctggtgggcttactggggccaagggactctggtcaccgtctcctca

SEQ ID NO: 89 - protein, 109 aa, Artificial
  unknown organism
QTVVTQEPSLTVSPGGTVTLTCRSSTGAVTSGYYPNWVQQKPGQAPRGLIGATDMRPSGTPARFSGSLLGGKAALTLSGVQPEDEAEYYCALWYSNRWVFGGGTKLTVL

SEQ ID NO: 90 - DNA, 327 bp, Artificial
  unknown organism
cagactgttgtgactcaggaaccttcactcaccgtatcacctggtggaacagtcacactcacttgtcgctcctcgactggggctgttacatctggctactacccaaactgggtccaacaaaaaccaggtcaggcaccccgtggtctaataggtgccactgacatgaggccctctggtactcctgccagattctcaggctccctgcttggaggcaaggctgccctcaccctctcaggggtacagccagaggatgaggcagaatattactgtgctctatggtacagcaaccgctgggtgttcggtggaggaaccaaactgactgtccta

SEQ ID NO: 91 - protein, 125 aa, Artificial
  unknown organism
EVQLLESGGGLVQPGGSLKLSCAASGFTFNVYAMNWVRQAPGKGLEWVARIRSKYNNYATYYADSVKKRFTISRDDSKNTAYLQMNNLKTEDTAVYYCVRHGNFGNSYLSWWAYWGQGTLVTVSS

SEQ ID NO: 92 - DNA, 375 bp, Artificial
  unknown organism
gaggtgcagctgctcgagtctggaggaggattggtgcagcctggagggtcattgaaactctcatgtgcagcctctggattcaccttcaatgtctacgccatgaactgggtccgccaggctccaggaaagggtttggaatgggttgctcgcataagaagtaaatataataattatgcaacatattatgccgattcagtgaaaaagaggttcaccatctccagagatgattcaaaaaacactgcctatctacaaatgaacaacttgaaaactgaggacactgccgtgtactactgtgtgagacatgggaacttcggtaatagctacttatcctggtgggcttactggggccaagggactctggtcaccgtctcctca

SEQ ID NO: 93 - protein, 109 aa, Artificial
  unknown organism
ELVVTQEPSLTVSPGGTVTLTCRSSTGAVTSGYYPNWVQQKPGQAPRGLIGATDMRPSGTPARFSGSLLGGKAALTLSGVQPEDEAEYYCALWYSNRWVFGGGTKLTVL

SEQ ID NO: 94 - DNA, 327 bp, Artificial
  unknown organism
gagctcgttgtgactcaggaaccttcactcaccgtatcacctggtggaacagtcacactcacttgtcgctcctcgactggggctgttacatctggctactacccaaactgggtccaacaaaaaccaggtcaggcaccccgtggtctaataggtgccactgacatgaggccctctggtactcctgccagattctcaggctccctgcttggaggcaaggctgccctcaccctctcaggggtacagccagaggatgaggcagaatattactgtgctctatggtacagcaaccgctgggtgttcggtggaggaaccaaactgactgtccta

SEQ ID NO: 95 - protein, 249 aa, Artificial
  unknown organism
EVQLVESGGGLVQPGGSLKLSCAASGFTFNVYAMNWVRQAPGKGLEWVARIRSKYNNYATYYADSVKKRFTISRDDSKNTAYLQMNNLKTEDTAVYYCVRHGNFGNSYLSWWAYWGQGTLVTVSSGGGGSGGGGSGGGGSQTVVTQEPSLTVSPGGTVTLTCRSSTGAVTSGYYPNWVQQKPGQAPRGLIGATDMRPSGTPARFSGSLLGGKAALTLSGVQPEDEAEYYCALWYSNRWVFGGGTKLTVL

SEQ ID NO: 96 - DNA, 747 bp, Artificial
  unknown organism
gaggtgcagctggtcgagtctggaggaggattggtgcagcctggagggtcattgaaactctcatgtgcagcctctggattcaccttcaatgtctacgccatgaactgggtccgccaggctccaggaaagggtttggaatgggttgctcgcataagaagtaaatataataattatgcaacatattatgccgattcagtgaaaaagaggttcaccatctccagagatgattcaaaaaacactgcctatctacaaatgaacaacttgaaaactgaggacactgccgtgtactactgtgtgagacatgggaacttcggtaatagctacttatcctggtgggcttactggggccaagggactctggtcaccgtctcctcaggtggtggtggttctggcggcggcggctccggtggtggtggttctcagactgttgtgactcaggaaccttcactcaccgtatcacctggtggaacagtcacactcacttgtcgctcctcgactggggctgttacatctggctactacccaaactgggtccaacaaaaaccaggtcaggcaccccgtggtctaataggtgccactgacatgaggccctctggtactcctgccagattctcaggctccctgcttggaggcaaggctgccctcaccctctcaggggtacagccagaggatgaggcagaatattactgtgctctatggtacagcaaccgctgggtgttcggtggaggaaccaaactgactgtccta

SEQ ID NO: 97 - protein, 249 aa, Artificial
  unknown organism
EVQLLESGGGLVQPGGSLKLSCAASGFTFNVYAMNWVRQAPGKGLEWVARIRSKYNNYATYYADSVKKRFTISRDDSKNTAYLQMNNLKTEDTAVYYCVRHGNFGNSYLSWWAYWGQGTLVTVSSGGGGSGGGGSGGGGSELVVTQEPSLTVSPGGTVTLTCRSSTGAVTSGYYPNWVQQKPGQAPRGLIGATDMRPSGTPARFSGSLLGGKAALTLSGVQPEDEAEYYCALWYSNRWVFGGGTKLTVL

SEQ ID NO: 98 - DNA, 747 bp, Artificial
  unknown organism
gaggtgcagctgctcgagtctggaggaggattggtgcagcctggagggtcattgaaactctcatgtgcagcctctggattcaccttcaatgtctacgccatgaactgggtccgccaggctccaggaaagggtttggaatgggttgctcgcataagaagtaaatataataattatgcaacatattatgccgattcagtgaaaaagaggttcaccatctccagagatgattcaaaaaacactgcctatctacaaatgaacaacttgaaaactgaggacactgccgtgtactactgtgtgagacatgggaacttcggtaatagctacttatcctggtgggcttactggggccaagggactctggtcaccgtctcctcaggtggtggtggttctggcggcggcggctccggtggtggtggttctgagctcgttgtgactcaggaaccttcactcaccgtatcacctggtggaacagtcacactcacttgtcgctcctcgactggggctgttacatctggctactacccaaactgggtccaacaaaaaccaggtcaggcaccccgtggtctaataggtgccactgacatgaggccctctggtactcctgccagattctcaggctccctgcttggaggcaaggctgccctcaccctctcaggggtacagccagaggatgaggcagaatattactgtgctctatggtacagcaaccgctgggtgttcggtggaggaaccaaactgactgtccta

SEQ ID NO: 99 - protein, 14 aa, Artificial
  unknown organism
GSSTGAVTSGYYPN

SEQ ID NO: 100 - protein, 7 aa, Artificial
  unknown organism
GTKFLAP

SEQ ID NO: 101 - protein, 9 aa, Artificial
  unknown organism
ALWYSNRWV

SEQ ID NO: 102 - protein, 5 aa, Artificial
  unknown organism
KYAMN

SEQ ID NO: 103 - protein, 19 aa, Artificial
  unknown organism
RIRSKYNNYATYYADSVKS

SEQ ID NO: 104 - protein, 14 aa, Artificial
  unknown organism
HGNFGNSYTSYYAY

SEQ ID NO: 105 - protein, 125 aa, Artificial
  unknown organism
EVQLVESGGGLVQPGGSLKLSCAASGFTFNKYAMNWVRQAPGKGLEWVARIRSKYNNYATYYADSVKSRFTISRDDSKNTAYLQMNNLKTEDTAVYYCVRHGNFGNSYTSYYAYWGQGTLVTVSS

SEQ ID NO: 106 - DNA, 375 bp, Artificial
  unknown organism
gaggtgcagctggtcgagtctggaggaggattggtgcagcctggagggtcattgaaactctcatgtgcagcctctggattcaccttcaataagtacgccatgaactgggtccgccaggctccaggaaagggtttggaatgggttgctcgcataagaagtaaatataataattatgcaacatattatgccgattcagtgaaatcgaggttcaccatctccagagatgattcaaaaaacactgcctatctacaaatgaacaacttgaaaactgaggacactgccgtgtactactgtgtgagacatgggaacttcggtaatagctacacatcctactacgcttactggggccaagggactctggtcaccgtctcctca

SEQ ID NO: 107 - protein, 109 aa, Artificial; identical to SEQ ID NO: 17
  unknown organism

SEQ ID NO: 108 - DNA, 327 bp, Artificial; identical to SEQ ID NO: 18
  unknown organism

SEQ ID NO: 109 - protein, 125 aa, Artificial
  unknown organism
EVQLLESGGGLVQPGGSLKLSCAASGFTFNKYAMNWVRQAPGKGLEWVARIRSKYNNYATYYADSVKSRFTISRDDSKNTAYLQMNNLKTEDTAVYYCVRHGNFGNSYTSYYAYWGQGTLVTVSS

SEQ ID NO: 110 - DNA, 375 bp, Artificial
  unknown organism
gaggtgcagctgctcgagtctggaggaggattggtgcagcctggagggtcattgaaactctcatgtgcagcctctggattcaccttcaataagtacgccatgaactgggtccgccaggctccaggaaagggtttggaatgggttgctcgcataagaagtaaatataataattatgcaacatattatgccgattcagtgaaatcgaggttcaccatctccagagatgattcaaaaaacactgcctatctacaaatgaacaacttgaaaactgaggacactgccgtgtactactgtgtgagacatgggaacttcggtaatagctacacatcctactacgcttactggggccaagggactctggtcaccgtctcctca

SEQ ID NO: 111 - protein, 109 aa, Artificial; identical to SEQ ID NO: 21
  unknown organism

SEQ ID NO: 112 - DNA, 327 bp, Artificial; identical to SEQ ID NO: 22
  unknown organism

SEQ ID NO: 113 - protein, 249 aa, Artificial
  unknown organism
EVQLVESGGGLVQPGGSLKLSCAASGFTFNKYAMNWVRQAPGKGLEWVARIRSKYNNYATYYADSVKSRFTISRDDSKNTAYLQMNNLKTEDTAVYYCVRHGNFGNSYTSYYAYWGQGTLVTVSSGGGGSGGGGSGGGGSQTVVTQEPSLTVSPGGTVTLTCGSSTGAVTSGYYPNWVQQKPGQAPRGLIGGTKFLAPGTPARFSGSLLGGKAALTLSGVQPEDEAEYYCALWYSNRWVFGGGTKLTVL

SEQ ID NO: 114 - DNA, 747 bp, Artificial
  unknown organism
gaggtgcagctggtcgagtctggaggaggattggtgcagcctggagggtcattgaaactctcatgtgcagcctctggattcaccttcaataagtacgccatgaactgggtccgccaggctccaggaaagggtttggaatgggttgctcgcataagaagtaaatataataattatgcaacatattatgccgattcagtgaaatcgaggttcaccatctccagagatgattcaaaaaacactgcctatctacaaatgaacaacttgaaaactgaggacactgccgtgtactactgtgtgagacatgggaacttcggtaatagctacacatcctactacgcttactggggccaagggactctggtcaccgtctcctcaggtggtggtggttctggcggcggcggctccggtggtggtggttctcagactgttgtgactcaggaaccttcactcaccgtatcacctggtggaacagtcacactcacttgtggctcctcgactggggctgttacatctggctactacccaaactgggtccaacaaaaaccaggtcaggcaccccgtggtctaataggtgggactaagttcctcgcccccggtactcctgccagattctcaggctccctgcttggaggcaaggctgccctcaccctctcaggggtacagccagaggatgaggcagaatattactgtgctctatggtacagcaaccgctgggtgttcggtggaggaaccaaactgactgtccta

SEQ ID NO: 115 - protein, 249 aa, Artificial
  unknown organism
EVQLLESGGGLVQPGGSLKLSCAASGFTFNKYAMNWVRQAPGKGLEWVARIRSKYNNYATYYADSVKSRFTISRDDSKNTAYLQMNNLKTEDTAVYYCVRHGNFGNSYTSYYAYWGQGTLVTVSSGGGGSGGGGSGGGGSELVVTQEPSLTVSPGGTVTLTCGSSTGAVTSGYYPNWVQQKPGQAPRGLIGGTKFLAPGTPARFSGSLLGGKAALTLSGVQPEDEAEYYCALWYSNRWVFGGGTKLTVL

SEQ ID NO: 116 - DNA, 747 bp, Artificial
  unknown organism
gaggtgcagctgctcgagtctggaggaggattggtgcagcctggagggtcattgaaactctcatgtgcagcctctggattcaccttcaataagtacgccatgaactgggtccgccaggctccaggaaagggtttggaatgggttgctcgcataagaagtaaatataataattatgcaacatattatgccgattcagtgaaatcgaggttcaccatctccagagatgattcaaaaaacactgcctatctacaaatgaacaacttgaaaactgaggacactgccgtgtactactgtgtgagacatgggaacttcggtaatagctacacatcctactacgcttactggggccaagggactctggtcaccgtctcctcaggtggtggtggttctggcggcggcggctccggtggtggtggttctgagctcgttgtgactcaggaaccttcactcaccgtatcacctggtggaacagtcacactcacttgtggctcctcgactggggctgttacatctggctactacccaaactgggtccaacaaaaaccaggtcaggcaccccgtggtctaataggtgggactaagttcctcgcccccggtactcctgccagattctcaggctccctgcttggaggcaaggctgccctcaccctctcaggggtacagccagaggatgaggcagaatattactgtgctctatggtacagcaaccgctgggtgttcggtggaggaaccaaactgactgtccta

SEQ ID NO: 117 - protein, 14 aa, Artificial
  unknown organism
RSSTGAVTSGYYPN

SEQ ID NO: 118 - protein, 7 aa, Artificial
  unknown organism
ATDMRPS

SEQ ID NO: 119 - protein, 9 aa, Artificial
  unknown organism
ALWYSNRWV

SEQ ID NO: 120 - protein, 5 aa, Artificial
  unknown organism
GYAMN

SEQ ID NO: 121 - protein, 19 aa, Artificial
  unknown organism
RIRSKYNNYATYYADSVKE

SEQ ID NO: 122 - protein, 14 aa, Artificial
  unknown organism
HRNFGNSYLSWFAY

SEQ ID NO: 123 - protein, 125 aa, Artificial
  unknown organism
EVQLVESGGGLVQPGGSLKLSCAASGFTFNGYAMNWVRQAPGKGLEWVARIRSKYNNYATYYADSVKERFTISRDDSKNTAYLQMNNLKTEDTAVYYCVRHRNFGNSYLSWFAYWGQGTLVTVSS

SEQ ID NO: 124 - DNA, 375 bp, Artificial
  unknown organism
gaggtgcagctggtcgagtctggaggaggattggtgcagcctggagggtcattgaaactctcatgtgcagcctctggattcaccttcaatggctacgccatgaactgggtccgccaggctccaggaaagggtttggaatgggttgctcgcataagaagtaaatataataattatgcaacatattatgccgattcagtgaaagagaggttcaccatctccagagatgattcaaaaaacactgcctatctacaaatgaacaacttgaaaactgaggacactgccgtgtactactgtgtgagacataggaacttcggtaatagctacttatcctggttcgcttactggggccaagggactctggtcaccgtctcctca

SEQ ID NO: 125 - protein, 109 aa, Artificial; identical to SEQ ID NO: 89
  unknown organism

SEQ ID NO: 126 - DNA, 327 bp, Artificial; identical to SEQ ID NO: 90
  unknown organism

SEQ ID NO: 127 - protein, 125 aa, Artificial
  unknown organism
EVQLLESGGGLVQPGGSLKLSCAASGFTFNGYAMNWVRQAPGKGLEWVARIRSKYNNYATYYADSVKERFTISRDDSKNTAYLQMNNLKTEDTAVYYCVRHRNFGNSYLSWFAYWGQGTLVTVSS

SEQ ID NO: 128 - DNA, 375 bp, Artificial
  unknown organism
gaggtgcagctgctcgagtctggaggaggattggtgcagcctggagggtcattgaaactctcatgtgcagcctctggattcaccttcaatggctacgccatgaactgggtccgccaggctccaggaaagggtttggaatgggttgctcgcataagaagtaaatataataattatgcaacatattatgccgattcagtgaaagagaggttcaccatctccagagatgattcaaaaaacactgcctatctacaaatgaacaacttgaaaactgaggacactgccgtgtactactgtgtgagacataggaacttcggtaatagctacttatcctggttcgcttactggggccaagggactctggtcaccgtctcctca

SEQ ID NO: 129 - protein, 109 aa, Artificial; identical to SEQ ID NO: 93
  unknown organism

SEQ ID NO: 130 - DNA, 327 bp, Artificial; identical to SEQ ID NO: 94
  unknown organism

SEQ ID NO: 131 - protein, 249 aa, Artificial
  unknown organism
EVQLVESGGGLVQPGGSLKLSCAASGFTFNGYAMNWVRQAPGKGLEWVARIRSKYNNYATYYADSVKERFTISRDDSKNTAYLQMNNLKTEDTAVYYCVRHRNFGNSYLSWFAYWGQGTLVTVSSGGGGSGGGGSGGGGSQTVVTQEPSLTVSPGGTVTLTCRSSTGAVTSGYYPNWVQQKPGQAPRGLIGATDMRPSGTPARFSGSLLGGKAALTLSGVQPEDEAEYYCALWYSNRWVFGGGTKLTVL

SEQ ID NO: 132 - DNA, 747 bp, Artificial
  unknown organism
gaggtgcagctggtcgagtctggaggaggattggtgcagcctggagggtcattgaaactctcatgtgcagcctctggattcaccttcaatggctacgccatgaactgggtccgccaggctccaggaaagggtttggaatgggttgctcgcataagaagtaaatataataattatgcaacatattatgccgattcagtgaaagagaggttcaccatctccagagatgattcaaaaaacactgcctatctacaaatgaacaacttgaaaactgaggacactgccgtgtactactgtgtgagacataggaacttcggtaatagctacttatcctggttcgcttactggggccaagggactctggtcaccgtctcctcaggtggtggtggttctggcggcggcggctccggtggtggtggttctcagactgttgtgactcaggaaccttcactcaccgtatcacctggtggaacagtcacactcacttgtcgctcctcgactggggctgttacatctggctactacccaaactgggtccaacaaaaaccaggtcaggcaccccgtggtctaataggtgccactgacatgaggccctctggtactcctgccagattctcaggctccctgcttggaggcaaggctgccctcaccctctcaggggtacagccagaggatgaggcagaatattactgtgctctatggtacagcaaccgctgggtgttcggtggaggaaccaaactgactgtccta

SEQ ID NO: 133 - protein, 249 aa, Artificial
  unknown organism
EVQLLESGGGLVQPGGSLKLSCAASGFTFNGYAMNWVRQAPGKGLEWVARIRSKYNNYATYYADSVKERFTISRDDSKNTAYLQMNNLKTEDTAVYYCVRHRNFGNSYLSWFAYWGQGTLVTVSSGGGGSGGGGSGGGGSELVVTQEPSLTVSPGGTVTLTCRSSTGAVTSGYYPNWVQQKPGQAPRGLIGATDMRPSGTPARFSGSLLGGKAALTLSGVQPEDEAEYYCALWYSNRWVFGGGTKLTVL

SEQ ID NO: 134 - DNA, 747 bp, Artificial
  unknown organism
gaggtgcagctgctcgagtctggaggaggattggtgcagcctggagggtcattgaaactctcatgtgcagcctctggattcaccttcaatggctacgccatgaactgggtccgccaggctccaggaaagggtttggaatgggttgctcgcataagaagtaaatataataattatgcaacatattatgccgattcagtgaaagagaggttcaccatctccagagatgattcaaaaaacactgcctatctacaaatgaacaacttgaaaactgaggacactgccgtgtactactgtgtgagacataggaacttcggtaatagctacttatcctggttcgcttactggggccaagggactctggtcaccgtctcctcaggtggtggtggttctggcggcggcggctccggtggtggtggttctgagctcgttgtgactcaggaaccttcactcaccgtatcacctggtggaacagtcacactcacttgtcgctcctcgactggggctgttacatctggctactacccaaactgggtccaacaaaaaccaggtcaggcaccccgtggtctaataggtgccactgacatgaggccctctggtactcctgccagattctcaggctccctgcttggaggcaaggctgccctcaccctctcaggggtacagccagaggatgaggcagaatattactgtgctctatggtacagcaaccgctgggtgttcggtggaggaaccaaactgactgtccta

SEQ ID NO: 135 - protein, 14 aa, Artificial
  unknown organism
GSSTGAVTSGYYPN

SEQ ID NO: 136 - protein, 7 aa, Artificial
  unknown organism
GTKFLAP

SEQ ID NO: 137 - protein, 9 aa, Artificial
  unknown organism
ALWYSNRWV

SEQ ID NO: 138 - protein, 5 aa, Artificial
  unknown organism
VYAMN

SEQ ID NO: 139 - protein, 19 aa, Artificial
  unknown organism
RIRSKYNNYATYYADSVKK

SEQ ID NO: 140 - protein, 14 aa, Artificial
  unknown organism
HGNFGNSYISWWAY

SEQ ID NO: 141 - protein, 125 aa, Artificial
  unknown organism
EVQLVESGGGLVQPGGSLKLSCAASGFTFNVYAMNWVRQAPGKGLEWVARIRSKYNNYATYYADSVKKRFTISRDDSKNTAYLQMNNLKTEDTAVYYCVRHGNFGNSYISWWAYWGQGTLVTVSS

SEQ ID NO: 142 - DNA, 375 bp, Artificial
  unknown organism
gaggtgcagctggtcgagtctggaggaggattggtgcagcctggagggtcattgaaactctcatgtgcagcctctggattcaccttcaatgtgtacgccatgaactgggtccgccaggctccaggaaagggtttggaatgggttgctcgcataagaagtaaatataataattatgcaacatattatgccgattcagtgaaaaagaggttcaccatctccagagatgattcaaaaaacactgcctatctacaaatgaacaacttgaaaactgaggacactgccgtgtactactgtgtgagacatgggaacttcggtaatagctacatatcctggtgggcttactggggccaagggactctggtcaccgtctcctca

SEQ ID NO: 143 - protein, 109 aa, Artificial; identical to SEQ ID NO: 17
  unknown organism

SEQ ID NO: 144 - DNA, 327 bp, Artificial; identical to SEQ ID NO: 18
  unknown organism

SEQ ID NO: 145 - protein, 125 aa, Artificial
  unknown organism
EVQLLESGGGLVQPGGSLKLSCAASGFTFNVYAMNWVRQAPGKGLEWVARIRSKYNNYATYYADSVKKRFTISRDDSKNTAYLQMNNLKTEDTAVYYCVRHGNFGNSYISWWAYWGQGTLVTVSS

SEQ ID NO: 146 - DNA, 375 bp, Artificial
  unknown organism
gaggtgcagctgctcgagtctggaggaggattggtgcagcctggagggtcattgaaactctcatgtgcagcctctggattcaccttcaatgtgtacgccatgaactgggtccgccaggctccaggaaagggtttggaatgggttgctcgcataagaagtaaatataataattatgcaacatattatgccgattcagtgaaaaagaggttcaccatctccagagatgattcaaaaaacactgcctatctacaaatgaacaacttgaaaactgaggacactgccgtgtactactgtgtgagacatgggaacttcggtaatagctacatatcctggtgggcttactggggccaagggactctggtcaccgtctcctca

SEQ ID NO: 147 - protein, 109 aa, Artificial; identical to SEQ ID NO: 21
  unknown organism

SEQ ID NO: 148 - DNA, 327 bp, Artificial; identical to SEQ ID NO: 22
  unknown organism

SEQ ID NO: 149 - protein, 249 aa, Artificial
  unknown organism
EVQLVESGGGLVQPGGSLKLSCAASGFTFNVYAMNWVRQAPGKGLEWVARIRSKYNNYATYYADSVKKRFTISRDDSKNTAYLQMNNLKTEDTAVYYCVRHGNFGNSYISWWAYWGQGTLVTVSSGGGGSGGGGSGGGGSQTVVTQEPSLTVSPGGTVTLTCGSSTGAVTSGYYPNWVQQKPGQAPRGLIGGTKFLAPGTPARFSGSLLGGKAALTLSGVQPEDEAEYYCALWYSNRWVFGGGTKLTVL

SEQ ID NO: 150 - DNA, 747 bp, Artificial
  unknown organism
gaggtgcagctggtcgagtctggaggaggattggtgcagcctggagggtcattgaaactctcatgtgcagcctctggattcaccttcaatgtgtacgccatgaactgggtccgccaggctccaggaaagggtttggaatgggttgctcgcataagaagtaaatataataattatgcaacatattatgccgattcagtgaaaaagaggttcaccatctccagagatgattcaaaaaacactgcctatctacaaatgaacaacttgaaaactgaggacactgccgtgtactactgtgtgagacatgggaacttcggtaatagctacatatcctggtgggcttactggggccaagggactctggtcaccgtctcctcaggtggtggtggttctggcggcggcggctccggtggtggtggttctcagactgttgtgactcaggaaccttcactcaccgtatcacctggtggaacagtcacactcacttgtggctcctcgactggggctgttacatctggctactacccaaactgggtccaacaaaaaccaggtcaggcaccccgtggtctaataggtgggactaagttcctcgcccccggtactcctgccagattctcaggctccctgcttggaggcaaggctgccctcaccctctcaggggtacagccagaggatgaggcagaatattactgtgctctatggtacagcaaccgctgggtgttcggtggaggaaccaaactgactgtccta

SEQ ID NO: 151 - protein, 249 aa, Artificial
  unknown organism
EVQLLESGGGLVQPGGSLKLSCAASGFTFNVYAMNWVRQAPGKGLEWVARIRSKYNNYATYYADSVKKRFTISRDDSKNTAYLQMNNLKTEDTAVYYCVRHGNFGNSYISWWAYWGQGTLVTVSSGGGGSGGGGSGGGGSELVVTQEPSLTVSPGGTVTLTCGSSTGAVTSGYYPNWVQQKPGQAPRGLIGGTKFLAPGTPARFSGSLLGGKAALTLSGVQPEDEAEYYCALWYSNRWVFGGGTKLTVL

SEQ ID NO: 152 - DNA, 747 bp, Artificial
  unknown organism
gaggtgcagctgctcgagtctggaggaggattggtgcagcctggagggtcattgaaactctcatgtgcagcctctggattcaccttcaatgtgtacgccatgaactgggtccgccaggctccaggaaagggtttggaatgggttgctcgcataagaagtaaatataataattatgcaacatattatgccgattcagtgaaaaagaggttcaccatctccagagatgattcaaaaaacactgcctatctacaaatgaacaacttgaaaactgaggacactgccgtgtactactgtgtgagacatgggaacttcggtaatagctacatatcctggtgggcttactggggccaagggactctggtcaccgtctcctcaggtggtggtggttctggcggcggcggctccggtggtggtggttctgagctcgttgtgactcaggaaccttcactcaccgtatcacctggtggaacagtcacactcacttgtggctcctcgactggggctgttacatctggctactacccaaactgggtccaacaaaaaccaggtcaggcaccccgtggtctaataggtgggactaagttcctcgcccccggtactcctgccagattctcaggctccctgcttggaggcaaggctgccctcaccctctcaggggtacagccagaggatgaggcagaatattactgtgctctatggtacagcaaccgctgggtgttcggtggaggaaccaaactgactgtccta

SEQ ID NO: 153 - protein, 14 aa, Artificial
  unknown organism
GSSTGAVTSGNYPN

SEQ ID NO: 154 - protein, 7 aa, Artificial
  unknown organism
GTKFLAP

SEQ ID NO: 155 - protein, 9 aa, Artificial
  unknown organism
VLWYSNRWV

SEQ ID NO: 156 - protein, 5 aa, Artificial
  unknown organism
SYAMN

SEQ ID NO: 157 - protein, 19 aa, Artificial
  unknown organism
RIRSKYNNYATYYADSVKG

SEQ ID NO: 158 - protein, 14 aa, Artificial
  unknown organism
HGNFGNSYVSWWAY

SEQ ID NO: 159 - protein, 125 aa, Artificial
  unknown organism
EVQLVESGGGLVQPGGSLKLSCAASGFTFNSYAMNWVRQAPGKGLEWVARIRSKYNNYATYYADSVKGRFTISRDDSKNTAYLQMNNLKTEDTAVYYCVRHGNFGNSYVSWWAYWGQGTLVTVSS

SEQ ID NO: 160 - DNA, 375 bp, Artificial
  unknown organism
gaggtgcagctggtcgagtctggaggaggattggtgcagcctggagggtcattgaaactctcatgtgcagcctctggattcaccttcaatagctacgccatgaactgggtccgccaggctccaggaaagggtttggaatgggttgctcgcataagaagtaaatataataattatgcaacatattatgccgattcagtgaaaggcaggttcaccatctccagagatgattcaaaaaacactgcctatctacaaatgaacaacttgaaaactgaggacactgccgtgtactactgtgtgagacatgggaacttcggtaatagctacgtttcctggtgggcttactggggccaagggactctggtcaccgtctcctca

SEQ ID NO: 161 - protein, 109 aa, Artificial
  unknown organism
QTVVTQEPSLTVSPGGTVTLTCGSSTGAVTSGNYPNWVQQKPGQAPRGLIGGTKFLAPGTPARFSGSLLGGKAALTLSGVQPEDEAEYYCVLWYSNRWVFGGGTKLTVL

SEQ ID NO: 162 - DNA, 327 bp, Artificial
  unknown organism
cagactgttgtgactcaggaaccttcactcaccgtatcacctggtggaacagtcacactcacttgtggctcctcgactggggctgttacatctggcaactacccaaactgggtccaacaaaaaccaggtcaggcaccccgtggtctaataggtgggactaagttcctcgcccccggtactcctgccagattctcaggctccctgcttggaggcaaggctgccctcaccctctcaggggtacagccagaggatgaggcagaatattactgtgttctatggtacagcaaccgctgggtgttcggtggaggaaccaaactgactgtccta

SEQ ID NO: 163 - protein, 125 aa, Artificial
  unknown organism
EVQLLESGGGLVQPGGSLKLSCAASGFTFNSYAMNWVRQAPGKGLEWVARIRSKYNNYATYYADSVKGRFTISRDDSKNTAYLQMNNLKTEDTAVYYCVRHGNFGNSYVSWWAYWGQGTLVTVSS

SEQ ID NO: 164 - DNA, 375 bp, Artificial
  unknown organism
gaggtgcagctgctcgagtctggaggaggattggtgcagcctggagggtcattgaaactctcatgtgcagcctctggattcaccttcaatagctacgccatgaactgggtccgccaggctccaggaaagggtttggaatgggttgctcgcataagaagtaaatataataattatgcaacatattatgccgattcagtgaaaggcaggttcaccatctccagagatgattcaaaaaacactgcctatctacaaatgaacaacttgaaaactgaggacactgccgtgtactactgtgtgagacatgggaacttcggtaatagctacgtttcctggtgggcttactggggccaagggactctggtcaccgtctcctca

SEQ ID NO: 165 - protein, 109 aa, Artificial
  unknown organism
ELVVTQEPSLTVSPGGTVTLTCGSSTGAVTSGNYPNWVQQKPGQAPRGLIGGTKFLAPGTPARFSGSLLGGKAALTLSGVQPEDEAEYYCVLWYSNRWVFGGGTKLTVL

SEQ ID NO: 166 - DNA, 327 bp, Artificial
  unknown organism
gagctcgttgtgactcaggaaccttcactcaccgtatcacctggtggaacagtcacactcacttgtggctcctcgactggggctgttacatctggcaactacccaaactgggtccaacaaaaaccaggtcaggcaccccgtggtctaataggtgggactaagttcctcgcccccggtactcctgccagattctcaggctccctgcttggaggcaaggctgccctcaccctctcaggggtacagccagaggatgaggcagaatattactgtgttctatggtacagcaaccgctgggtgttcggtggaggaaccaaactgactgtccta

SEQ ID NO: 167 - protein, 249 aa, Artificial
  unknown organism
EVQLVESGGGLVQPGGSLKLSCAASGFTFNSYAMNWVRQAPGKGLEWVARIRSKYNNYATYYADSVKGRFTISRDDSKNTAYLQMNNLKTEDTAVYYCVRHGNFGNSYVSWWAYWGQGTLVTVSSGGGGSGGGGSGGGGSQTVVTQEPSLTVSPGGTVTLTCGSSTGAVTSGNYPNWVQQKPGQAPRGLIGGTKFLAPGTPARFSGSLLGGKAALTLSGVQPEDEAEYYCVLWYSNRWVFGGGTKLTVL

SEQ ID NO: 168 - DNA, 747 bp, Artificial
  unknown organism
gaggtgcagctggtcgagtctggaggaggattggtgcagcctggagggtcattgaaactctcatgtgcagcctctggattcaccttcaatagctacgccatgaactgggtccgccaggctccaggaaagggtttggaatgggttgctcgcataagaagtaaatataataattatgcaacatattatgccgattcagtgaaaggcaggttcaccatctccagagatgattcaaaaaacactgcctatctacaaatgaacaacttgaaaactgaggacactgccgtgtactactgtgtgagacatgggaacttcggtaatagctacgtttcctggtgggcttactggggccaagggactctggtcaccgtctcctcaggtggtggtggttctggcggcggcggctccggtggtggtggttctcagactgttgtgactcaggaaccttcactcaccgtatcacctggtggaacagtcacactcacttgtggctcctcgactggggctgttacatctggcaactacccaaactgggtccaacaaaaaccaggtcaggcaccccgtggtctaataggtgggactaagttcctcgcccccggtactcctgccagattctcaggctccctgcttggaggcaaggctgccctcaccctctcaggggtacagccagaggatgaggcagaatattactgtgttctatggtacagcaaccgctgggtgttcggtggaggaaccaaactgactgtccta

SEQ ID NO: 169 - protein, 249 aa, Artificial
  unknown organism
EVQLLESGGGLVQPGGSLKLSCAASGFTFNSYAMNWVRQAPGKGLEWVARIRSKYNNYATYYADSVKGRFTISRDDSKNTAYLQMNNLKTEDTAVYYCVRHGNFGNSYVSWWAYWGQGTLVTVSSGGGGSGGGGSGGGGSELVVTQEPSLTVSPGGTVTLTCGSSTGAVTSGNYPNWVQQKPGQAPRGLIGGTKFLAPGTPARFSGSLLGGKAALTLSGVQPEDEAEYYCVLWYSNRWVFGGGTKLTVL

SEQ ID NO: 170 - DNA, 747 bp, Artificial
  unknown organism
gaggtgcagctgctcgagtctggaggaggattggtgcagcctggagggtcattgaaactctcatgtgcagcctctggattcaccttcaatagctacgccatgaactgggtccgccaggctccaggaaagggtttggaatgggttgctcgcataagaagtaaatataataattatgcaacatattatgccgattcagtgaaaggcaggttcaccatctccagagatgattcaaaaaacactgcctatctacaaatgaacaacttgaaaactgaggacactgccgtgtactactgtgtgagacatgggaacttcggtaatagctacgtttcctggtgggcttactggggccaagggactctggtcaccgtctcctcaggtggtggtggttctggcggcggcggctccggtggtggtggttctgagctcgttgtgactcaggaaccttcactcaccgtatcacctggtggaacagtcacactcacttgtggctcctcgactggggctgttacatctggcaactacccaaactgggtccaacaaaaaccaggtcaggcaccccgtggtctaataggtgggactaagttcctcgcccccggtactcctgccagattctcaggctccctgcttggaggcaaggctgccctcaccctctcaggggtacagccagaggatgaggcagaatattactgtgttctatggtacagcaaccgctgggtgttcggtggaggaaccaaactgactgtccta

SEQ ID NO: 171 - protein, 14 aa, Artificial
  unknown organism
GSSTGAVTSGNYPN

SEQ ID NO: 172 - protein, 7 aa, Artificial
  unknown organism
GTKFLAP

SEQ ID NO: 173 - protein, 9 aa, Artificial
  unknown organism
VLWYSNRWV

SEQ ID NO: 174 - protein, 5 aa, Artificial
  unknown organism
KYAMN

SEQ ID NO: 175 - protein, 19 aa, Artificial
  unknown organism
RIRSKYNNYATYYADSVKD

SEQ ID NO: 176 - protein, 14 aa, Artificial
  unknown organism
HGNFGNSYISYWAY

SEQ ID NO: 177 - protein, 125 aa, Artificial; identical to SEQ ID NO: 33
  unknown organism

SEQ ID NO: 178 - DNA, 375 bp, Artificial; identical to SEQ ID NO: 34
  unknown organism

SEQ ID NO: 179 - protein, 109 aa, Artificial; identical to SEQ ID NO: 161
  unknown organism

SEQ ID NO: 180 - DNA, 327 bp, Artificial; identical to SEQ ID NO: 162
  unknown organism

SEQ ID NO: 181 - protein, 125 aa, Artificial; identical to SEQ ID NO: 37
  unknown organism

SEQ ID NO: 182 - DNA, 375 bp, Artificial; identical to SEQ ID NO: 38
  unknown organism

SEQ ID NO: 183 - protein, 109 aa, Artificial; identical to SEQ ID NO: 165
  unknown organism

SEQ ID NO: 184 - DNA, 327 bp, Artificial; identical to SEQ ID NO: 166
  unknown organism

SEQ ID NO: 185 - protein, 249 aa, Artificial
  unknown organism
EVQLVESGGGLVQPGGSLKLSCAASGFTFNKYAMNWVRQAPGKGLEWVARIRSKYNNYATYYADSVKDRFTISRDDSKNTAYLQMNNLKTEDTAVYYCVRHGNFGNSYISYWAYWGQGTLVTVSSGGGGSGGGGSGGGGSQTVVTQEPSLTVSPGGTVTLTCGSSTGAVTSGNYPNWVQQKPGQAPRGLIGGTKFLAPGTPARFSGSLLGGKAALTLSGVQPEDEAEYYCVLWYSNRWVFGGGTKLTVL

SEQ ID NO: 186 - DNA, 747 bp, Artificial
  unknown organism
gaggtgcagctggtcgagtctggaggaggattggtgcagcctggagggtcattgaaactctcatgtgcagcctctggattcaccttcaataagtacgccatgaactgggtccgccaggctccaggaaagggtttggaatgggttgctcgcataagaagtaaatataataattatgcaacatattatgccgattcagtgaaagacaggttcaccatctccagagatgattcaaaaaacactgcctatctacaaatgaacaacttgaaaactgaggacactgccgtgtactactgtgtgagacatgggaacttcggtaatagctacatatcctactgggcttactggggccaagggactctggtcaccgtctcctcaggtggtggtggttctggcggcggcggctccggtggtggtggttctcagactgttgtgactcaggaaccttcactcaccgtatcacctggtggaacagtcacactcacttgtggctcctcgactggggctgttacatctggcaactacccaaactgggtccaacaaaaaccaggtcaggcaccccgtggtctaataggtgggactaagttcctcgcccccggtactcctgccagattctcaggctccctgcttggaggcaaggctgccctcaccctctcaggggtacagccagaggatgaggcagaatattactgtgttctatggtacagcaaccgctgggtgttcggtggaggaaccaaactgactgtccta

SEQ ID NO: 187 - protein, 249 aa, Artificial
  unknown organism
EVQLLESGGGLVQPGGSLKLSCAASGFTFNKYAMNWVRQAPGKGLEWVARIRSKYNNYATYYADSVKDRFTISRDDSKNTAYLQMNNLKTEDTAVYYCVRHGNFGNSYISYWAYWGQGTLVTVSSGGGGSGGGGSGGGGSELVVTQEPSLTVSPGGTVTLTCGSSTGAVTSGNYPNWVQQKPGQAPRGLIGGTKFLAPGTPARFSGSLLGGKAALTLSGVQPEDEAEYYCVLWYSNRWVFGGGTKLTVL

SEQ ID NO: 188 - DNA, 747 bp, Artificial
  unknown organism
gaggtgcagctgctcgagtctggaggaggattggtgcagcctggagggtcattgaaactctcatgtgcagcctctggattcaccttcaataagtacgccatgaactgggtccgccaggctccaggaaagggtttggaatgggttgctcgcataagaagtaaatataataattatgcaacatattatgccgattcagtgaaagacaggttcaccatctccagagatgattcaaaaaacactgcctatctacaaatgaacaacttgaaaactgaggacactgccgtgtactactgtgtgagacatgggaacttcggtaatagctacatatcctactgggcttactggggccaagggactctggtcaccgtctcctcaggtggtggtggttctggcggcggcggctccggtggtggtggttctgagctcgttgtgactcaggaaccttcactcaccgtatcacctggtggaacagtcacactcacttgtggctcctcgactggggctgttacatctggcaactacccaaactgggtccaacaaaaaccaggtcaggcaccccgtggtctaataggtgggactaagttcctcgcccccggtactcctgccagattctcaggctccctgcttggaggcaaggctgccctcaccctctcaggggtacagccagaggatgaggcagaatattactgtgttctatggtacagcaaccgctgggtgttcggtggaggaaccaaactgactgtccta

SEQ ID NO: 189 - protein, 15 aa, Artificial
  unknown organism
RASQSVSSSTYSYIH

SEQ ID NO: 190 - protein, 7 aa, Artificial
  unknown organism
YASNLES

SEQ ID NO: 191 - protein, 9 aa, Artificial
  unknown organism
QHSWEIPFT

SEQ ID NO: 192 - protein, 5 aa, Artificial
  unknown organism
DCVII

SEQ ID NO: 193 - protein, 17 aa, Artificial
  unknown organism
QIYPGTGRSYYNEIFKG

SEQ ID NO: 194 - protein, 11 aa, Artificial
  unknown organism
STLIHGTWFSY

SEQ ID NO: 195 - protein, 120 aa, Artificial
  unknown organism
QVQLQQSGPDLVKPGASVKMSCKASGHTFTDCVIIWVKQRAGQGLEWIGQIYPGTGRSYYNEIFKGKATLTADKSSNTVHIQLSSLTSEDSAVYFCALSTLIHGTWFSYWGQGTLVTVSS

SEQ ID NO: 196 - DNA, 360 bp, Artificial
  unknown organism
caggttcagctgcagcagtctggacctgatctggtgaagcctggggcctcagtgaagatgtcctgcaaggcttctggacacactttcactgactgtgttataatctgggtgaaacagagagctggacagggccttgagtggattggacagatttatccagggactggtcgttcttactacaatgagattttcaagggcaaggccacactgactgcagacaaatcctccaacacagtccacattcaactcagcagcctgacatctgaggactctgcggtctatttctgtgccctatctactcttattcacgggacctggttttcttattggggccaagggactctggtcactgtctcttcc

SEQ ID NO: 197 - protein, 111 aa, Artificial
  unknown organism
DIVLTQSPASLPVSLGQRATISCRASQSVSSSTYSYIHWYQQKPGQPPKLLITYASNLESGVPARFSGSGSGTDFTLDIHPVEEDDSSTYYCQHSWEIPFTFGSGTKLEIK

SEQ ID NO: 198 - DNA, 333 bp, Artificial
  unknown organism
gacattgtgctgacacagtctcctgcttccttacctgtgtctctggggcagagggccaccatctcatgcagggccagccaaagtgtcagttcatctacttatagttatatacactggtaccaacagaaaccaggacagccacccaaactcctcatcacgtatgcatccaacctagaatctggggtccctgccaggttcagtggcagtgggtctgggacagacttcaccctcgacatccatcctgtggaggaggatgattcttcaacatattactgtcagcacagttgggagattccatttacgttcggctcggggacaaagttggaaataaaa

SEQ ID NO: 199 - protein, 246 aa, Artificial
  unknown organism
DIVLTQSPASLPVSLGQRATISCRASQSVSSSTYSYIHWYQQKPGQPPKLLITYASNLESGVPARFSGSGSGTDFTLDIHPVEEDDSSTYYCQHSWEIPFTFGSGTKLEIKGGGGSGGGGSGGGGSQVQLQQSGPDLVKPGASVKMSCKASGHTFTDCVIIWVKQRAGQGLEWIGQIYPGTGRSYYNEIFKGKATLTADKSSNTVHIQLSSLTSEDSAVYFCALSTLIHGTWFSYWGQGTLVTVSS

SEQ ID NO: 200 - DNA, 738 bp, Artificial
  unknown organism
gacattgtgctgacacagtctcctgcttccttacctgtgtctctggggcagagggccaccatctcatgcagggccagccaaagtgtcagttcatctacttatagttatatacactggtaccaacagaaaccaggacagccacccaaactcctcatcacgtatgcatccaacctagaatctggggtccctgccaggttcagtggcagtgggtctgggacagacttcaccctcgacatccatcctgtggaggaggatgattcttcaacatattactgtcagcacagttgggagattccatttacgttcggctcggggacaaagttggaaataaaaggtggtggtggttctggcggcggcggctccggtggtggtggttctcaggttcagctgcagcagtctggacctgatctggtgaagcctggggcctcagtgaagatgtcctgcaaggcttctggacacactttcactgactgtgttataatctgggtgaaacagagagctggacagggccttgagtggattggacagatttatccagggactggtcgttcttactacaatgagattttcaagggcaaggccacactgactgcagacaaatcctccaacacagtccacattcaactcagcagcctgacatctgaggactctgcggtctatttctgtgccctatctactcttattcacgggacctggttttcttattggggccaagggactctggtcactgtctcttcc

SEQ ID NO: 201 - protein, 17 aa, Artificial
  unknown organism
KSSQSVLNSSNNRNYLA

SEQ ID NO: 202 - protein, 7 aa, Artificial
  unknown organism
WASTRES

SEQ ID NO: 203 - protein, 9 aa, Artificial
  unknown organism
QQHYSTPFT

SEQ ID NO: 204 - protein, 5 aa, Artificial
  unknown organism
NYYIH

SEQ ID NO: 205 - protein, 17 aa, Artificial
  unknown organism
WINPNSGATNYAQKFQG

SEQ ID NO: 206 - protein, 8 aa, Artificial
  unknown organism
SWVSWFAS

SEQ ID NO: 207 - protein, 117 aa, Artificial
  unknown organism
QVQLVQSGAEVKRPGASMKVSCKASGYTFTNYYIHWVRQAPGQGLEWMGWINPNSGATNYAQKFQGRVTMTRDTSTSTVYMELSSLRSEDTAVYYCAKSWVSWFASWGQGTLVTVSS

SEQ ID NO: 208 - DNA, 351 bp, Artificial
  unknown organism
caggtgcagctggtccagtctggggctgaggtgaagaggcctggggcctcaatgaaggtctcctgcaaggcttctgggtacaccttcaccaactactatatacactgggtgcgacaggcccctggacaaggtcttgagtggatgggttggatcaaccctaacagtggtgccacaaactatgcacagaagttccagggcagagtcaccatgaccagggacacgtccacgagcacagtctacatggagctgagcagcctgagatctgaggacacggccgtgtattactgtgcgaaatcctgggtctcctggtttgcttcctggggtcaaggaaccttggtcaccgtctcctca

SEQ ID NO: 209 - protein, 113 aa, Artificial
  unknown organism
DIVMTQSPDSLAVSLGERATINCKSSQSVLNSSNNRNYLAWYQQKPGQPPKLLIYWASTRESGVPDRFSGSGSGTDFTLTISGLQAEDVAVYYCQQHYSTPFTFGPGTKVDIK

SEQ ID NO: 210 - DNA, 339 bp, Artificial
  unknown organism
gatatcgtgatgacccagtctccagactccctggctgtgtctctgggcgagagggccaccatcaactgcaagtccagccagagtgttttaaacagctccaacaataggaactacttagcttggtaccagcagaaaccaggacagcctcctaagctgctcatttactgggcatctacccgggaatccggggtccctgaccgattcagtggcagcgggtctgggacagatttcactctcaccatcagtggcctgcaggctgaagatgtggcagtttattactgtcagcaacattatagtactccattcacttttggccctgggaccaaagtggatatcaaa

SEQ ID NO: 211 - protein, 117 aa, Artificial
  unknown organism
EVQLLESGAEVKRPGASMKVSCKASGYTFTNYYIHWVRQAPGQGLEWMGWINPNSGATNYAQKFQGRVTMTRDTSTSTVYMELSSLRSEDTAVYYCAKSWVSWFASWGQGTLVTVSS

SEQ ID NO: 212 - DNA, 351 bp, Artificial
  unknown organism
gaggtgcagctgctcgagtctggggctgaggtgaagaggcctggggcctcaatgaaggtctcctgcaaggcttctgggtacaccttcaccaactactatatacactgggtgcgacaggcccctggacaaggtcttgagtggatgggttggatcaaccctaacagtggtgccacaaactatgcacagaagttccagggcagagtcaccatgaccagggacacgtccacgagcacagtctacatggagctgagcagcctgagatctgaggacacggccgtgtattactgtgcgaaatcctgggtctcctggtttgcttcctggggtcaaggaaccttggtcaccgtctcctca

SEQ ID NO: 213 - protein, 113 aa, Artificial
  unknown organism
ELVMTQSPDSLAVSLGERATINCKSSQSVLNSSNNRNYLAWYQQKPGQPPKLLIYWASTRESGVPDRFSGSGSGTDFTLTISGLQAEDVAVYYCQQHYSTPFTFGPGTKVDIK

SEQ ID NO: 214 - DNA, 339 bp, Artificial
  unknown organism
gagctcgtgatgacccagtctccagactccctggctgtgtctctgggcgagagggccaccatcaactgcaagtccagccagagtgttttaaacagctccaacaataggaactacttagcttggtaccagcagaaaccaggacagcctcctaagctgctcatttactgggcatctacccgggaatccggggtccctgaccgattcagtggcagcgggtctgggacagatttcactctcaccatcagtggcctgcaggctgaagatgtggcagtttattactgtcagcaacattatagtactccattcacttttggccctgggaccaaagtggatatcaaa

SEQ ID NO: 215 - protein, 245 aa, Artificial
  unknown organism
QVQLVQSGAEVKRPGASMKVSCKASGYTFTNYYIHWVRQAPGQGLEWMGWINPNSGATNYAQKFQGRVTMTRDTSTSTVYMELSSLRSEDTAVYYCAKSWVSWFASWGQGTLVTVSSGGGGSGGGGSGGGGSDIVMTQSPDSLAVSLGERATINCKSSQSVLNSSNNRNYLAWYQQKPGQPPKLLIYWASTRESGVPDRFSGSGSGTDFTLTISGLQAEDVAVYYCQQHYSTPFTFGPGTKVDIK

SEQ ID NO: 216 - DNA, 735 bp, Artificial
  unknown organism
caggtgcagctggtccagtctggggctgaggtgaagaggcctggggcctcaatgaaggtctcctgcaaggcttctgggtacaccttcaccaactactatatacactgggtgcgacaggcccctggacaaggtcttgagtggatgggttggatcaaccctaacagtggtgccacaaactatgcacagaagttccagggcagagtcaccatgaccagggacacgtccacgagcacagtctacatggagctgagcagcctgagatctgaggacacggccgtgtattactgtgcgaaatcctgggtctcctggtttgcttcctggggtcaaggaaccttggtcaccgtctcctcaggtggtggtggttctggcggcggcggctccggtggtggtggttctgatatcgtgatgacccagtctccagactccctggctgtgtctctgggcgagagggccaccatcaactgcaagtccagccagagtgttttaaacagctccaacaataggaactacttagcttggtaccagcagaaaccaggacagcctcctaagctgctcatttactgggcatctacccgggaatccggggtccctgaccgattcagtggcagcgggtctgggacagatttcactctcaccatcagtggcctgcaggctgaagatgtggcagtttattactgtcagcaacattatagtactccattcacttttggccctgggaccaaagtggatatcaaa

SEQ ID NO: 217 - protein, 245 aa, Artificial
  unknown organism
EVQLLESGAEVKRPGASMKVSCKASGYTFTNYYIHWVRQAPGQGLEWMGWINPNSGATNYAQKFQGRVTMTRDTSTSTVYMELSSLRSEDTAVYYCAKSWVSWFASWGQGTLVTVSSGGGGSGGGGSGGGGSELVMTQSPDSLAVSLGERATINCKSSQSVLNSSNNRNYLAWYQQKPGQPPKLLIYWASTRESGVPDRFSGSGSGTDFTLTISGLQAEDVAVYYCQQHYSTPFTFGPGTKVDIK

SEQ ID NO: 218 - DNA, 735 bp, Artificial
  unknown organism
gaggtgcagctgctcgagtctggggctgaggtgaagaggcctggggcctcaatgaaggtctcctgcaaggcttctgggtacaccttcaccaactactatatacactgggtgcgacaggcccctggacaaggtcttgagtggatgggttggatcaaccctaacagtggtgccacaaactatgcacagaagttccagggcagagtcaccatgaccagggacacgtccacgagcacagtctacatggagctgagcagcctgagatctgaggacacggccgtgtattactgtgcgaaatcctgggtctcctggtttgcttcctggggtcaaggaaccttggtcaccgtctcctcaggtggtggtggttctggcggcggcggctccggtggtggtggttctgagctcgtgatgacccagtctccagactccctggctgtgtctctgggcgagagggccaccatcaactgcaagtccagccagagtgttttaaacagctccaacaataggaactacttagcttggtaccagcagaaaccaggacagcctcctaagctgctcatttactgggcatctacccgggaatccggggtccctgaccgattcagtggcagcgggtctgggacagatttcactctcaccatcagtggcctgcaggctgaagatgtggcagtttattactgtcagcaacattatagtactccattcacttttggccctgggaccaaagtggatatcaaa

SEQ ID NO: 219 - protein, 17 aa, Artificial
  unknown organism
KSSQSVLNSSNNRNYLA

SEQ ID NO: 220 - protein, 7 aa, Artificial
  unknown organism
WASTRES

SEQ ID NO: 221 - protein, 9 aa, Artificial
  unknown organism
QQHYSTPFT

SEQ ID NO: 222 - protein, 5 aa, Artificial
  unknown organism
GYYMH

SEQ ID NO: 223 - protein, 17 aa, Artificial
  unknown organism
WINPNSGGTSYAQKFQG

SEQ ID NO: 224 - protein, 8 aa, Artificial
  unknown organism
SWVSWFAS

SEQ ID NO: 225 - protein, 117 aa, Artificial
  unknown organism
QVQLVQSGAEVKKPGASVKVSCKASGYTFTGYYMHWVRQAPGQGLEWMGWINPNSGGTSYAQKFQGRVTMTRDTSTSTVYMELSNLRSDDTAVYYCAKSWVSWFASWGQGTLVTVSS

SEQ ID NO: 226 - DNA, 351 bp, Artificial
  unknown organism
caggtgcagctggtccagtctggggctgaggtgaagaagcctggggcctcagtgaaggtctcctgcaaggcttctggatacaccttcaccggctactatatgcactgggtgcgacaggcccctggacaagggcttgagtggatgggatggatcaaccctaacagtggtggcacaagctacgcacagaagttccagggcagagtcaccatgactagggacacgtccacgagcacagtctacatggagctgagcaacctgagatctgacgacacggccgtgtattactgtgcgaaatcctgggtctcctggtttgcttcctggggtcaaggaaccttggtcaccgtctcctca

SEQ ID NO: 227 - protein, 113 aa, Artificial; identical to SEQ ID NO: 209
  unknown organism

SEQ ID NO: 228 - DNA, 339 bp, Artificial; identical to SEQ ID NO: 210
  unknown organism

SEQ ID NO: 229 - protein, 117 aa, Artificial
  unknown organism
EVQLLESGAEVKKPGASVKVSCKASGYTFTGYYMHWVRQAPGQGLEWMGWINPNSGGTSYAQKFQGRVTMTRDTSTSTVYMELSNLRSDDTAVYYCAKSWVSWFASWGQGTLVTVSS

SEQ ID NO: 230 - DNA, 351 bp, Artificial
  unknown organism
gaggtgcagctgctcgagtctggggctgaggtgaagaagcctggggcctcagtgaaggtctcctgcaaggcttctggatacaccttcaccggctactatatgcactgggtgcgacaggcccctggacaagggcttgagtggatgggatggatcaaccctaacagtggtggcacaagctacgcacagaagttccagggcagagtcaccatgactagggacacgtccacgagcacagtctacatggagctgagcaacctgagatctgacgacacggccgtgtattactgtgcgaaatcctgggtctcctggtttgcttcctggggtcaaggaaccttggtcaccgtctcctca

SEQ ID NO: 231 - protein, 113 aa, Artificial; identical to SEQ ID NO: 213
  unknown organism

SEQ ID NO: 232 - DNA, 339 bp, Artificial; identical to SEQ ID NO: 214
  unknown organism

SEQ ID NO: 233 - protein, 245 aa, Artificial
  unknown organism
QVQLVQSGAEVKKPGASVKVSCKASGYTFTGYYMHWVRQAPGQGLEWMGWINPNSGGTSYAQKFQGRVTMTRDTSTSTVYMELSNLRSDDTAVYYCAKSWVSWFASWGQGTLVTVSSGGGGSGGGGSGGGGSDIVMTQSPDSLAVSLGERATINCKSSQSVLNSSNNRNYLAWYQQKPGQPPKLLIYWASTRESGVPDRFSGSGSGTDFTLTISGLQAEDVAVYYCQQHYSTPFTFGPGTKVDIK

SEQ ID NO: 234 - DNA, 735 bp, Artificial
  unknown organism
caggtgcagctggtccagtctggggctgaggtgaagaagcctggggcctcagtgaaggtctcctgcaaggcttctggatacaccttcaccggctactatatgcactgggtgcgacaggcccctggacaagggcttgagtggatgggatggatcaaccctaacagtggtggcacaagctacgcacagaagttccagggcagagtcaccatgactagggacacgtccacgagcacagtctacatggagctgagcaacctgagatctgacgacacggccgtgtattactgtgcgaaatcctgggtctcctggtttgcttcctggggtcaaggaaccttggtcaccgtctcctcaggtggtggtggttctggcggcggcggctccggtggtggtggttctgatatcgtgatgacccagtctccagactccctggctgtgtctctgggcgagagggccaccatcaactgcaagtccagccagagtgttttaaacagctccaacaataggaactacttagcttggtaccagcagaaaccaggacagcctcctaagctgctcatttactgggcatctacccgggaatccggggtccctgaccgattcagtggcagcgggtctgggacagatttcactctcaccatcagtggcctgcaggctgaagatgtggcagtttattactgtcagcaacattatagtactccattcacttttggccctgggaccaaagtggatatcaaa

SEQ ID NO: 235 - protein, 245 aa, Artificial
  unknown organism
EVQLLESGAEVKKPGASVKVSCKASGYTFTGYYMHWVRQAPGQGLEWMGWINPNSGGTSYAQKFQGRVTMTRDTSTSTVYMELSNLRSDDTAVYYCAKSWVSWFASWGQGTLVTVSSGGGGSGGGGSGGGGSELVMTQSPDSLAVSLGERATINCKSSQSVLNSSNNRNYLAWYQQKPGQPPKLLIYWASTRESGVPDRFSGSGSGTDFTLTISGLQAEDVAVYYCQQHYSTPFTFGPGTKVDIK

SEQ ID NO: 236 - DNA, 735 bp, Artificial
  unknown organism
gaggtgcagctgctcgagtctggggctgaggtgaagaagcctggggcctcagtgaaggtctcctgcaaggcttctggatacaccttcaccggctactatatgcactgggtgcgacaggcccctggacaagggcttgagtggatgggatggatcaaccctaacagtggtggcacaagctacgcacagaagttccagggcagagtcaccatgactagggacacgtccacgagcacagtctacatggagctgagcaacctgagatctgacgacacggccgtgtattactgtgcgaaatcctgggtctcctggtttgcttcctggggtcaaggaaccttggtcaccgtctcctcaggtggtggtggttctggcggcggcggctccggtggtggtggttctgagctcgtgatgacccagtctccagactccctggctgtgtctctgggcgagagggccaccatcaactgcaagtccagccagagtgttttaaacagctccaacaataggaactacttagcttggtaccagcagaaaccaggacagcctcctaagctgctcatttactgggcatctacccgggaatccggggtccctgaccgattcagtggcagcgggtctgggacagatttcactctcaccatcagtggcctgcaggctgaagatgtggcagtttattactgtcagcaacattatagtactccattcacttttggccctgggaccaaagtggatatcaaa

SEQ ID NO: 237 - protein, 17 aa, Artificial
  unknown organism
KSSQSVLSSSNNKNYLN

SEQ ID NO: 238 - protein, 7 aa, Artificial
  unknown organism
WASTRES

SEQ ID NO: 239 - protein, 9 aa, Artificial
  unknown organism
QQHYSVPFT

SEQ ID NO: 240 - protein, 6 aa, Artificial
  unknown organism
SSNWWS

SEQ ID NO: 241 - protein, 16 aa, Artificial
  unknown organism
TIYYNGNTYYNPSLKS

SEQ ID NO: 242 - protein, 8 aa, Artificial
  unknown organism
SWVSWFAS

SEQ ID NO: 243 - protein, 117 aa, Artificial
  unknown organism
QVQLQESGPGLVKPSETLSLTCVVSGGSISSSNWWSWVRQPPGKGLEWLGTIYYNGNTYYNPSLKSRVTISVDTSKNQFSLRLSSVTAADTAVYYCAKSWVSWFASWGQGTLVTVSS

SEQ ID NO: 244 - DNA, 351 bp, Artificial
  unknown organism
caggtgcagctgcaagagtctggcccaggactggtgaagccttcggagaccctgtccctcacctgcgttgtctctggtggctccatcagcagtagtaactggtggagctgggtccgccagcccccagggaagggactggagtggcttgggactatctattataatgggaatacctactacaacccgtccctcaagagtcgagtcaccatctccgtagacacgtccaagaaccagttctccctgaggctgagctctgtgaccgccgcagacacggccgtgtattactgtgcgaaatcctgggtctcctggtttgcttcctggggtcaaggaaccttggtcaccgtctcctca

SEQ ID NO: 245 - protein, 113 aa, Artificial
  unknown organism
DIVMTQSPDSLAVSLGERATINCKSSQSVLSSSNNKNYLNWYQQKPGQPPKLLIYWASTRESGVPDRFSGSGSGTDFTLTISSLQAEDVAVYYCQQHYSVPFTFGPGTKVDIK

SEQ ID NO: 246 - DNA, 339 bp, Artificial
  unknown organism
gatatcgtgatgacacagtctccagactccctggctgtgtctctgggcgagagggccaccatcaactgcaagtccagccagagtgtcttatccagctccaacaataagaactacttaaattggtaccagcagaaaccaggacagcctcctaagttgctcatttactgggcatctacccgggaatccggggtccctgaccgattcagtggcagcgggtctgggacagatttcactctcaccatcagcagcctgcaggctgaagatgtggcagtttattactgtcagcaacattatagtgttccattcactttcggccctgggaccaaagtggatatcaaa

SEQ ID NO: 247 - protein, 117 aa, Artificial
  unknown organism
EVQLLESGPGLVKPSETLSLTCVVSGGSISSSNWWSWVRQPPGKGLEWLGTIYYNGNTYYNPSLKSRVTISVDTSKNQFSLRLSSVTAADTAVYYCAKSWVSWFASWGQGTLVTVSS

SEQ ID NO: 248 - DNA, 351 bp, Artificial
  unknown organism
gaggtgcagctgctcgagtctggcccaggactggtgaagccttcggagaccctgtccctcacctgcgttgtctctggtggctccatcagcagtagtaactggtggagctgggtccgccagcccccagggaagggactggagtggcttgggactatctattataatgggaatacctactacaacccgtccctcaagagtcgagtcaccatctccgtagacacgtccaagaaccagttctccctgaggctgagctctgtgaccgccgcagacacggccgtgtattactgtgcgaaatcctgggtctcctggtttgcttcctggggtcaaggaaccttggtcaccgtctcctca

SEQ ID NO: 249 - protein, 113 aa, Artificial
  unknown organism
ELVMTQSPDSLAVSLGERATINCKSSQSVLSSSNNKNYLNWYQQKPGQPPKLLIYWASTRESGVPDRFSGSGSGTDFTLTISSLQAEDVAVYYCQQHYSVPFTFGPGTKVDIK

SEQ ID NO: 250 - DNA, 339 bp, Artificial
  unknown organism
gagctcgtgatgacacagtctccagactccctggctgtgtctctgggcgagagggccaccatcaactgcaagtccagccagagtgtcttatccagctccaacaataagaactacttaaattggtaccagcagaaaccaggacagcctcctaagttgctcatttactgggcatctacccgggaatccggggtccctgaccgattcagtggcagcgggtctgggacagatttcactctcaccatcagcagcctgcaggctgaagatgtggcagtttattactgtcagcaacattatagtgttccattcactttcggccctgggaccaaagtggatatcaaa

SEQ ID NO: 251 - protein, 245 aa, Artificial
  unknown organism
QVQLQESGPGLVKPSETLSLTCVVSGGSISSSNWWSWVRQPPGKGLEWLGTIYYNGNTYYNPSLKSRVTISVDTSKNQFSLRLSSVTAADTAVYYCAKSWVSWFASWGQGTLVTVSSGGGGSGGGGSGGGGSDIVMTQSPDSLAVSLGERATINCKSSQSVLSSSNNKNYLNWYQQKPGQPPKLLIYWASTRESGVPDRFSGSGSGTDFTLTISSLQAEDVAVYYCQQHYSVPFTFGPGTKVDIK

SEQ ID NO: 252 - DNA, 735 bp, Artificial
  unknown organism
caggtgcagctgcaagagtctggcccaggactggtgaagccttcggagaccctgtccctcacctgcgttgtctctggtggctccatcagcagtagtaactggtggagctgggtccgccagcccccagggaagggactggagtggcttgggactatctattataatgggaatacctactacaacccgtccctcaagagtcgagtcaccatctccgtagacacgtccaagaaccagttctccctgaggctgagctctgtgaccgccgcagacacggccgtgtattactgtgcgaaatcctgggtctcctggtttgcttcctggggtcaaggaaccttggtcaccgtctcctcaggtggtggtggttctggcggcggcggctccggtggtggtggttctgatatcgtgatgacacagtctccagactccctggctgtgtctctgggcgagagggccaccatcaactgcaagtccagccagagtgtcttatccagctccaacaataagaactacttaaattggtaccagcagaaaccaggacagcctcctaagttgctcatttactgggcatctacccgggaatccggggtccctgaccgattcagtggcagcgggtctgggacagatttcactctcaccatcagcagcctgcaggctgaagatgtggcagtttattactgtcagcaacattatagtgttccattcactttcggccctgggaccaaagtggatatcaaa

SEQ ID NO: 253 - protein, 245 aa, Artificial
  unknown organism
EVQLLESGPGLVKPSETLSLTCVVSGGSISSSNWWSWVRQPPGKGLEWLGTIYYNGNTYYNPSLKSRVTISVDTSKNQFSLRLSSVTAADTAVYYCAKSWVSWFASWGQGTLVTVSSGGGGSGGGGSGGGGSELVMTQSPDSLAVSLGERATINCKSSQSVLSSSNNKNYLNWYQQKPGQPPKLLIYWASTRESGVPDRFSGSGSGTDFTLTISSLQAEDVAVYYCQQHYSVPFTFGPGTKVDIK

SEQ ID NO: 254 - DNA, 735 bp, Artificial
  unknown organism
gaggtgcagctgctcgagtctggcccaggactggtgaagccttcggagaccctgtccctcacctgcgttgtctctggtggctccatcagcagtagtaactggtggagctgggtccgccagcccccagggaagggactggagtggcttgggactatctattataatgggaatacctactacaacccgtccctcaagagtcgagtcaccatctccgtagacacgtccaagaaccagttctccctgaggctgagctctgtgaccgccgcagacacggccgtgtattactgtgcgaaatcctgggtctcctggtttgcttcctggggtcaaggaaccttggtcaccgtctcctcaggtggtggtggttctggcggcggcggctccggtggtggtggttctgagctcgtgatgacacagtctccagactccctggctgtgtctctgggcgagagggccaccatcaactgcaagtccagccagagtgtcttatccagctccaacaataagaactacttaaattggtaccagcagaaaccaggacagcctcctaagttgctcatttactgggcatctacccgggaatccggggtccctgaccgattcagtggcagcgggtctgggacagatttcactctcaccatcagcagcctgcaggctgaagatgtggcagtttattactgtcagcaacattatagtgttccattcactttcggccctgggaccaaagtggatatcaaa

SEQ ID NO: 255 - protein, 11 aa, Artificial
  unknown organism
RASQSVSSNLA

SEQ ID NO: 256 - protein, 7 aa, Artificial
  unknown organism
DASNRAT

SEQ ID NO: 257 - protein, 9 aa, Artificial
  unknown organism
QQFGDTLWT

SEQ ID NO: 258 - protein, 5 aa, Artificial
  unknown organism
SYAMS

SEQ ID NO: 259 - protein, 16 aa, Artificial
  unknown organism
SISSGNIIYYPDNVKG

SEQ ID NO: 260 - protein, 10 aa, Artificial
  unknown organism
GRSTYGGFDH

SEQ ID NO: 261 - protein, 118 aa, Artificial
  unknown organism
EVQLLESGGGLVQPGGSLRLSCAASGFTFSSYAMSWVRQAPGKGLEWVASISSGNIIYYPDNVKGRFTISRDNSKNTLYLQMNSLRAEDTAVYYCTRGRSTYGGFDHWGQGTTVTVSS

SEQ ID NO: 262 - DNA, 354 bp, Artificial
  unknown organism
gaggtgcagctgctcgagtctgggggaggccttgtgcagcctggagggtctctgaggctctcctgtgcagcctctggattcactttcagtagttatgccatgtcttgggttcgccaggctccagggaaggggctggagtgggtcgcttccattagtagtggtaatatcatctactatccagacaatgtgaagggccgattcaccatctctagagataattccaagaacaccctgtacctgcaaatgaacagtctgagggctgaggacacggccgtgtattattgtactagaggccgcagtacctacgggggatttgaccactggggccaaggcaccacagtcaccgtctcctca

SEQ ID NO: 263 - protein, 107 aa, Artificial
  unknown organism
EIVLTQSPATLSVSPGERATLSCRASQSVSSNLAWYQQKPGQAPRLLIYDASNRATGIPARFSGSGSGTDFTLTISSLEPEDFAVYYCQQFGDTLWTFGQGTKVEIK

SEQ ID NO: 264 - DNA, 321 bp, Artificial
  unknown organism
gagatcgtgttgacacagtctccagccaccctgtctgtgtctccaggggaaagagccaccctctcctgcagggccagtcagagtgttagcagcaacttagcctggtaccagcagaaacctggccaggctcccaggctcctcatctatgatgcatccaacagggccactggcatcccagccaggttcagtggcagtgggtctgggacagacttcactctcaccatcagcagcctagagcctgaagattttgcagtttattactgtcagcagttcggtgatacactgtggacgttcggccaagggaccaaggtggagatcaaa

SEQ ID NO: 265 - protein, 118 aa, Artificial; identical to SEQ ID NO: 261
  unknown organism

SEQ ID NO: 266 - DNA, 354 bp, Artificial; identical to SEQ ID NO: 262
  unknown organism

SEQ ID NO: 267 - protein, 107 aa, Artificial
  unknown organism
ELVLTQSPATLSVSPGERATLSCRASQSVSSNLAWYQQKPGQAPRLLIYDASNRATGIPARFSGSGSGTDFTLTISSLEPEDFAVYYCQQFGDTLWTFGQGTKVEIK

SEQ ID NO: 268 - DNA, 321 bp, Artificial
  unknown organism
gagctcgtgttgacacagtctccagccaccctgtctgtgtctccaggggaaagagccaccctctcctgcagggccagtcagagtgttagcagcaacttagcctggtaccagcagaaacctggccaggctcccaggctcctcatctatgatgcatccaacagggccactggcatcccagccaggttcagtggcagtgggtctgggacagacttcactctcaccatcagcagcctagagcctgaagattttgcagtttattactgtcagcagttcggtgatacactgtggacgttcggccaagggaccaaggtggagatcaaa

SEQ ID NO: 269 - protein, 240 aa, Artificial
  unknown organism
EVQLLESGGGLVQPGGSLRLSCAASGFTFSSYAMSWVRQAPGKGLEWVASISSGNIIYYPDNVKGRFTISRDNSKNTLYLQMNSLRAEDTAVYYCTRGRSTYGGFDHWGQGTTVTVSSGGGGSGGGGSGGGGSEIVLTQSPATLSVSPGERATLSCRASQSVSSNLAWYQQKPGQAPRLLIYDASNRATGIPARFSGSGSGTDFTLTISSLEPEDFAVYYCQQFGDTLWTFGQGTKVEIK

SEQ ID NO: 270 - DNA, 720 bp, Artificial
  unknown organism
gaggtgcagctgctcgagtctgggggaggccttgtgcagcctggagggtctctgaggctctcctgtgcagcctctggattcactttcagtagttatgccatgtcttgggttcgccaggctccagggaaggggctggagtgggtcgcttccattagtagtggtaatatcatctactatccagacaatgtgaagggccgattcaccatctctagagataattccaagaacaccctgtacctgcaaatgaacagtctgagggctgaggacacggccgtgtattattgtactagaggccgcagtacctacgggggatttgaccactggggccaaggcaccacagtcaccgtctcctcaggtggtggtggttctggcggcggcggctccggtggtggtggttctgagatcgtgttgacacagtctccagccaccctgtctgtgtctccaggggaaagagccaccctctcctgcagggccagtcagagtgttagcagcaacttagcctggtaccagcagaaacctggccaggctcccaggctcctcatctatgatgcatccaacagggccactggcatcccagccaggttcagtggcagtgggtctgggacagacttcactctcaccatcagcagcctagagcctgaagattttgcagtttattactgtcagcagttcggtgatacactgtggacgttcggccaagggaccaaggtggagatcaaa

SEQ ID NO: 271 - protein, 240 aa, Artificial
  unknown organism
EVQLLESGGGLVQPGGSLRLSCAASGFTFSSYAMSWVRQAPGKGLEWVASISSGNIIYYPDNVKGRFTISRDNSKNTLYLQMNSLRAEDTAVYYCTRGRSTYGGFDHWGQGTTVTVSSGGGGSGGGGSGGGGSELVLTQSPATLSVSPGERATLSCRASQSVSSNLAWYQQKPGQAPRLLIYDASNRATGIPARFSGSGSGTDFTLTISSLEPEDFAVYYCQQFGDTLWTFGQGTKVEIK

SEQ ID NO: 272 - DNA, 720 bp, Artificial
  unknown organism
gaggtgcagctgctcgagtctgggggaggccttgtgcagcctggagggtctctgaggctctcctgtgcagcctctggattcactttcagtagttatgccatgtcttgggttcgccaggctccagggaaggggctggagtgggtcgcttccattagtagtggtaatatcatctactatccagacaatgtgaagggccgattcaccatctctagagataattccaagaacaccctgtacctgcaaatgaacagtctgagggctgaggacacggccgtgtattattgtactagaggccgcagtacctacgggggatttgaccactggggccaaggcaccacagtcaccgtctcctcaggtggtggtggttctggcggcggcggctccggtggtggtggttctgagctcgtgttgacacagtctccagccaccctgtctgtgtctccaggggaaagagccaccctctcctgcagggccagtcagagtgttagcagcaacttagcctggtaccagcagaaacctggccaggctcccaggctcctcatctatgatgcatccaacagggccactggcatcccagccaggttcagtggcagtgggtctgggacagacttcactctcaccatcagcagcctagagcctgaagattttgcagtttattactgtcagcagttcggtgatacactgtggacgttcggccaagggaccaaggtggagatcaaa

SEQ ID NO: 273 - protein, 11 aa, Artificial
  unknown organism
WASQGVSNNLA

SEQ ID NO: 274 - protein, 7 aa, Artificial
  unknown organism
DAFNRAT

SEQ ID NO: 275 - protein, 9 aa, Artificial
  unknown organism
QQFGDSLWT

SEQ ID NO: 276 - protein, 5 aa, Artificial
  unknown organism
SYAMS

SEQ ID NO: 277 - protein, 16 aa, Artificial
  unknown organism
SISSGNIIYYPDNVKG

SEQ ID NO: 278 - protein, 10 aa, Artificial
  unknown organism
GRSTYGGFDH

SEQ ID NO: 279 - protein, 118 aa, Artificial; identical to SEQ ID NO: 261
  unknown organism

SEQ ID NO: 280 - DNA, 354 bp, Artificial; identical to SEQ ID NO: 262
  unknown organism

SEQ ID NO: 281 - protein, 107 aa, Artificial
  unknown organism
EIVMTQSPATLSVSPGERVTLSCWASQGVSNNLAWYQQRPGQAPRLLIYDAFNRATGIPARFSGSGSGTDFTLTISRLEPEDFAVYYCQQFGDSLWTFGQGTKLEIK

SEQ ID NO: 282 - DNA, 321 bp, Artificial
  unknown organism
gagatcgtgatgacacagtctccagccaccctgtctgtgtctccaggggaaagagtcaccctctcctgctgggccagtcagggtgtgagcaacaacttagcctggtaccagcagagacctggccaggctcccaggctcctcatctatgatgcattcaacagggccactggcatcccagccaggttcagtggcagtgggtctgggacagacttcactctcaccatcagcagactggagcctgaagattttgcggtgtattactgtcagcagtttggtgattcactttggacgttcggccaggggaccaagctggaaatcaaa

SEQ ID NO: 283 - protein, 118 aa, Artificial; identical to SEQ ID NO: 261
  unknown organism

SEQ ID NO: 284 - DNA, 354 bp, Artificial; identical to SEQ ID NO: 262
  unknown organism

SEQ ID NO: 285 - protein, 107 aa, Artificial
  unknown organism
ELVMTQSPATLSVSPGERVTLSCWASQGVSNNLAWYQQRPGQAPRLLIYDAFNRATGIPARFSGSGSGTDFTLTISRLEPEDFAVYYCQQFGDSLWTFGQGTKLEIK

SEQ ID NO: 286 - DNA, 321 bp, Artificial
  unknown organism
gagctcgtgatgacacagtctccagccaccctgtctgtgtctccaggggaaagagtcaccctctcctgctgggccagtcagggtgtgagcaacaacttagcctggtaccagcagagacctggccaggctcccaggctcctcatctatgatgcattcaacagggccactggcatcccagccaggttcagtggcagtgggtctgggacagacttcactctcaccatcagcagactggagcctgaagattttgcggtgtattactgtcagcagtttggtgattcactttggacgttcggccaggggaccaagctggaaatcaaa

SEQ ID NO: 287 - protein, 240 aa, Artificial
  unknown organism
EVQLLESGGGLVQPGGSLRLSCAASGFTFSSYAMSWVRQAPGKGLEWVASISSGNIIYYPDNVKGRFTISRDNSKNTLYLQMNSLRAEDTAVYYCTRGRSTYGGFDHWGQGTTVTVSSGGGGSGGGGSGGGGSEIVMTQSPATLSVSPGERVTLSCWASQGVSNNLAWYQQRPGQAPRLLIYDAFNRATGIPARFSGSGSGTDFTLTISRLEPEDFAVYYCQQFGDSLWTFGQGTKLEIK

SEQ ID NO: 288 - DNA, 720 bp, Artificial
  unknown organism
gaggtgcagctgctcgagtctgggggaggccttgtgcagcctggagggtctctgaggctctcctgtgcagcctctggattcactttcagtagttatgccatgtcttgggttcgccaggctccagggaaggggctggagtgggtcgcttccattagtagtggtaatatcatctactatccagacaatgtgaagggccgattcaccatctctagagataattccaagaacaccctgtacctgcaaatgaacagtctgagggctgaggacacggccgtgtattattgtactagaggccgcagtacctacgggggatttgaccactggggccaaggcaccacagtcaccgtctcctcaggtggtggtggttctggcggcggcggctccggtggtggtggttctgagatcgtgatgacacagtctccagccaccctgtctgtgtctccaggggaaagagtcaccctctcctgctgggccagtcagggtgtgagcaacaacttagcctggtaccagcagagacctggccaggctcccaggctcctcatctatgatgcattcaacagggccactggcatcccagccaggttcagtggcagtgggtctgggacagacttcactctcaccatcagcagactggagcctgaagattttgcggtgtattactgtcagcagtttggtgattcactttggacgttcggccaggggaccaagctggaaatcaaa

SEQ ID NO: 289 - protein, 240 aa, Artificial
  unknown organism
EVQLLESGGGLVQPGGSLRLSCAASGFTFSSYAMSWVRQAPGKGLEWVASISSGNIIYYPDNVKGRFTISRDNSKNTLYLQMNSLRAEDTAVYYCTRGRSTYGGFDHWGQGTTVTVSSGGGGSGGGGSGGGGSELVMTQSPATLSVSPGERVTLSCWASQGVSNNLAWYQQRPGQAPRLLIYDAFNRATGIPARFSGSGSGTDFTLTISRLEPEDFAVYYCQQFGDSLWTFGQGTKLEIK

SEQ ID NO: 290 - DNA, 720 bp, Artificial
  unknown organism
gaggtgcagctgctcgagtctgggggaggccttgtgcagcctggagggtctctgaggctctcctgtgcagcctctggattcactttcagtagttatgccatgtcttgggttcgccaggctccagggaaggggctggagtgggtcgcttccattagtagtggtaatatcatctactatccagacaatgtgaagggccgattcaccatctctagagataattccaagaacaccctgtacctgcaaatgaacagtctgagggctgaggacacggccgtgtattattgtactagaggccgcagtacctacgggggatttgaccactggggccaaggcaccacagtcaccgtctcctcaggtggtggtggttctggcggcggcggctccggtggtggtggttctgagctcgtgatgacacagtctccagccaccctgtctgtgtctccaggggaaagagtcaccctctcctgctgggccagtcagggtgtgagcaacaacttagcctggtaccagcagagacctggccaggctcccaggctcctcatctatgatgcattcaacagggccactggcatcccagccaggttcagtggcagtgggtctgggacagacttcactctcaccatcagcagactggagcctgaagattttgcggtgtattactgtcagcagtttggtgattcactttggacgttcggccaggggaccaagctggaaatcaaa

SEQ ID NO: 291 - protein, 500 aa, Artificial
  unknown organism
DIVLTQSPASLPVSLGQRATISCRASQSVSSSTYSYIHWYQQKPGQPPKLLITYASNLESGVPARFSGSGSGTDFTLDIHPVEEDDSSTYYCQHSWEIPFTFGSGTKLEIKGGGGSGGGGSGGGGSQVQLQQSGPDLVKPGASVKMSCKASGHTFTDCVIIWVKQRAGQGLEWIGQIYPGTGRSYYNEIFKGKATLTADKSSNTVHIQLSSLTSEDSAVYFCALSTLIHGTWFSYWGQGTLVTVSSGGGGSEVQLLESGGGLVQPGGSLKLSCAASGFTFNIYAMNWVRQAPGKGLEWVARIRSKYNNYATYYADSVKSRFTISRDDSKNTAYLQMNNLKTEDTAVYYCVRHGNFGNSYVSFFAYWGQGTLVTVSSGGGGSGGGGSGGGGSELVVTQEPSLTVSPGGTVTLTCGSSTGAVTSGYYPNWVQQKPGQAPRGLIGGTKFLAPGTPARFSGSLLGGKAALTLSGVQPEDEAEYYCALWYSNRWVFGGGTKLTVL

SEQ ID NO: 292 - DNA, 1500 bp, Artificial
  unknown organism
gacattgtgctgacacagtctcctgcttccttacctgtgtctctggggcagagggccaccatctcatgcagggccagccaaagtgtcagttcatctacttatagttatatacactggtaccaacagaaaccaggacagccacccaaactcctcatcacgtatgcatccaacctagaatctggggtccctgccaggttcagtggcagtgggtctgggacagacttcaccctcgacatccatcctgtggaggaggatgattcttcaacatattactgtcagcacagttgggagattccatttacgttcggctcggggacaaagttggaaataaaaggtggtggtggttctggcggcggcggctccggtggtggtggttctcaggttcagctgcagcagtctggacctgatctggtgaagcctggggcctcagtgaagatgtcctgcaaggcttctggacacactttcactgactgtgttataatctgggtgaaacagagagctggacagggccttgagtggattggacagatttatccagggactggtcgttcttactacaatgagattttcaagggcaaggccacactgactgcagacaaatcctccaacacagtccacattcaactcagcagcctgacatctgaggactctgcggtctatttctgtgccctatctactcttattcacgggacctggttttcttattggggccaagggactctggtcactgtctcttccggaggtggtggctccgaggtgcagctgctcgagtctggaggaggattggtgcagcctggagggtcattgaaactctcatgtgcagcctctggattcaccttcaatatctacgccatgaactgggtccgccaggctccaggaaagggtttggaatgggttgctcgcataagaagtaaatataataattatgcaacatattatgccgattcagtgaaaagcaggttcaccatctccagagatgattcaaaaaacactgcctatctacaaatgaacaacttgaaaactgaggacactgccgtgtactactgtgtgagacatgggaacttcggtaatagctacgtatccttcttcgcttactggggccaagggactctggtcaccgtctcctcaggtggtggtggttctggcggcggcggctccggtggtggtggttctgagctcgttgtgactcaggaaccttcactcaccgtatcacctggtggaacagtcacactcacttgtggctcctcgactggggctgttacatctggctactacccaaactgggtccaacaaaaaccaggtcaggcaccccgtggtctaataggtgggactaagttcctcgcccccggtactcctgccagattctcaggctccctgcttggaggcaaggctgccctcaccctctcaggggtacagccagaggatgaggcagaatattactgtgctctatggtacagcaaccgctgggtgttcggtggaggaaccaaactgactgtccta

SEQ ID NO: 293 - protein, 500 aa, Artificial
  unknown organism
DIVLTQSPASLPVSLGQRATISCRASQSVSSSTYSYIHWYQQKPGQPPKLLITYASNLESGVPARFSGSGSGTDFTLDIHPVEEDDSSTYYCQHSWEIPFTFGSGTKLEIKGGGGSGGGGSGGGGSQVQLQQSGPDLVKPGASVKMSCKASGHTFTDCVIIWVKQRAGQGLEWIGQIYPGTGRSYYNEIFKGKATLTADKSSNTVHIQLSSLTSEDSAVYFCALSTLIHGTWFSYWGQGTLVTVSSGGGGSEVQLVESGGGLVQPGGSLKLSCAASGFTFNKYAMNWVRQAPGKGLEWVARIRSKYNNYATYYADSVKDRFTISRDDSKNTAYLQMNNLKTEDTAVYYCVRHGNFGNSYISYWAYWGQGTLVTVSSGGGGSGGGGSGGGGSQTVVTQEPSLTVSPGGTVTLTCGSSTGAVTSGYYPNWVQQKPGQAPRGLIGGTKFLAPGTPARFSGSLLGGKAALTLSGVQPEDEAEYYCALWYSNRWVFGGGTKLTVL

SEQ ID NO: 294 - DNA, 1500 bp, Artificial
  unknown organism
gacattgtgctgacacagtctcctgcttccttacctgtgtctctggggcagagggccaccatctcatgcagggccagccaaagtgtcagttcatctacttatagttatatacactggtaccaacagaaaccaggacagccacccaaactcctcatcacgtatgcatccaacctagaatctggggtccctgccaggttcagtggcagtgggtctgggacagacttcaccctcgacatccatcctgtggaggaggatgattcttcaacatattactgtcagcacagttgggagattccatttacgttcggctcggggacaaagttggaaataaaaggtggtggtggttctggcggcggcggctccggtggtggtggttctcaggttcagctgcagcagtctggacctgatctggtgaagcctggggcctcagtgaagatgtcctgcaaggcttctggacacactttcactgactgtgttataatctgggtgaaacagagagctggacagggccttgagtggattggacagatttatccagggactggtcgttcttactacaatgagattttcaagggcaaggccacactgactgcagacaaatcctccaacacagtccacattcaactcagcagcctgacatctgaggactctgcggtctatttctgtgccctatctactcttattcacgggacctggttttcttattggggccaagggactctggtcactgtctcttccggaggtggtggctccgaggtgcagctggtcgagtctggaggaggattggtgcagcctggagggtcattgaaactctcatgtgcagcctctggattcaccttcaataagtacgccatgaactgggtccgccaggctccaggaaagggtttggaatgggttgctcgcataagaagtaaatataataattatgcaacatattatgccgattcagtgaaagacaggttcaccatctccagagatgattcaaaaaacactgcctatctacaaatgaacaacttgaaaactgaggacactgccgtgtactactgtgtgagacatgggaacttcggtaatagctacatatcctactgggcttactggggccaagggactctggtcaccgtctcctcaggtggtggtggttctggcggcggcggctccggtggtggtggttctcagactgttgtgactcaggaaccttcactcaccgtatcacctggtggaacagtcacactcacttgtggctcctcgactggggctgttacatctggctactacccaaactgggtccaacaaaaaccaggtcaggcaccccgtggtctaataggtgggactaagttcctcgcccccggtactcctgccagattctcaggctccctgcttggaggcaaggctgccctcaccctctcaggggtacagccagaggatgaggcagaatattactgtgctctatggtacagcaaccgctgggtgttcggtggaggaaccaaactgactgtccta

SEQ ID NO: 295 - protein, 500 aa, Artificial
  unknown organism
DIVLTQSPASLPVSLGQRATISCRASQSVSSSTYSYIHWYQQKPGQPPKLLITYASNLESGVPARFSGSGSGTDFTLDIHPVEEDDSSTYYCQHSWEIPFTFGSGTKLEIKGGGGSGGGGSGGGGSQVQLQQSGPDLVKPGASVKMSCKASGHTFTDCVIIWVKQRAGQGLEWIGQIYPGTGRSYYNEIFKGKATLTADKSSNTVHIQLSSLTSEDSAVYFCALSTLIHGTWFSYWGQGTLVTVSSGGGGSEVQLLESGGGLVQPGGSLKLSCAASGFTFNKYAMNWVRQAPGKGLEWVARIRSKYNNYATYYADSVKDRFTISRDDSKNTAYLQMNNLKTEDTAVYYCVRHGNFGNSYISYWAYWGQGTLVTVSSGGGGSGGGGSGGGGSELVVTQEPSLTVSPGGTVTLTCGSSTGAVTSGYYPNWVQQKPGQAPRGLIGGTKFLAPGTPARFSGSLLGGKAALTLSGVQPEDEAEYYCALWYSNRWVFGGGTKLTVL

SEQ ID NO: 296 - DNA, 1500 bp, Artificial
  unknown organism
gacattgtgctgacacagtctcctgcttccttacctgtgtctctggggcagagggccaccatctcatgcagggccagccaaagtgtcagttcatctacttatagttatatacactggtaccaacagaaaccaggacagccacccaaactcctcatcacgtatgcatccaacctagaatctggggtccctgccaggttcagtggcagtgggtctgggacagacttcaccctcgacatccatcctgtggaggaggatgattcttcaacatattactgtcagcacagttgggagattccatttacgttcggctcggggacaaagttggaaataaaaggtggtggtggttctggcggcggcggctccggtggtggtggttctcaggttcagctgcagcagtctggacctgatctggtgaagcctggggcctcagtgaagatgtcctgcaaggcttctggacacactttcactgactgtgttataatctgggtgaaacagagagctggacagggccttgagtggattggacagatttatccagggactggtcgttcttactacaatgagattttcaagggcaaggccacactgactgcagacaaatcctccaacacagtccacattcaactcagcagcctgacatctgaggactctgcggtctatttctgtgccctatctactcttattcacgggacctggttttcttattggggccaagggactctggtcactgtctcttccggaggtggtggctccgaggtgcagctgctcgagtctggaggaggattggtgcagcctggagggtcattgaaactctcatgtgcagcctctggattcaccttcaataagtacgccatgaactgggtccgccaggctccaggaaagggtttggaatgggttgctcgcataagaagtaaatataataattatgcaacatattatgccgattcagtgaaagacaggttcaccatctccagagatgattcaaaaaacactgcctatctacaaatgaacaacttgaaaactgaggacactgccgtgtactactgtgtgagacatgggaacttcggtaatagctacatatcctactgggcttactggggccaagggactctggtcaccgtctcctcaggtggtggtggttctggcggcggcggctccggtggtggtggttctgagctcgttgtgactcaggaaccttcactcaccgtatcacctggtggaacagtcacactcacttgtggctcctcgactggggctgttacatctggctactacccaaactgggtccaacaaaaaccaggtcaggcaccccgtggtctaataggtgggactaagttcctcgcccccggtactcctgccagattctcaggctccctgcttggaggcaaggctgccctcaccctctcaggggtacagccagaggatgaggcagaatattactgtgctctatggtacagcaaccgctgggtgttcggtggaggaaccaaactgactgtccta

SEQ ID NO: 297 - protein, 500 aa, Artificial
  unknown organism
DIVLTQSPASLPVSLGQRATISCRASQSVSSSTYSYIHWYQQKPGQPPKLLITYASNLESGVPARFSGSGSGTDFTLDIHPVEEDDSSTYYCQHSWEIPFTFGSGTKLEIKGGGGSGGGGSGGGGSQVQLQQSGPDLVKPGASVKMSCKASGHTFTDCVIIWVKQRAGQGLEWIGQIYPGTGRSYYNEIFKGKATLTADKSSNTVHIQLSSLTSEDSAVYFCALSTLIHGTWFSYWGQGTLVTVSSGGGGSEVQLLESGGGLEQPGGSLKLSCAASGFTFNSYAMNWVRQAPGKGLEWVARIRSKYNNYATYYADSVKGRFTISRDDSKNTAYLQMNNLKTEDTAVYYCVRHGNFGNSYLSFWAYWGQGTLVTVSSGGGGSGGGGSGGGGSELVVTQEPSLTVSPGGTVTLTCGSSTGAVTSGYYPNWVQQKPGQAPRGLIGGTKFLAPGTPARFSGSLLGGKAALTLSGVQPEDEAEYYCALWYSNRWVFGGGTKLTVL

SEQ ID NO: 298 - DNA, 1500 bp, Artificial
  unknown organism
gacattgtgctgacacagtctcctgcttccttacctgtgtctctggggcagagggccaccatctcatgcagggccagccaaagtgtcagttcatctacttatagttatatacactggtaccaacagaaaccaggacagccacccaaactcctcatcacgtatgcatccaacctagaatctggggtccctgccaggttcagtggcagtgggtctgggacagacttcaccctcgacatccatcctgtggaggaggatgattcttcaacatattactgtcagcacagttgggagattccatttacgttcggctcggggacaaagttggaaataaaaggtggtggtggttctggcggcggcggctccggtggtggtggttctcaggttcagctgcagcagtctggacctgatctggtgaagcctggggcctcagtgaagatgtcctgcaaggcttctggacacactttcactgactgtgttataatctgggtgaaacagagagctggacagggccttgagtggattggacagatttatccagggactggtcgttcttactacaatgagattttcaagggcaaggccacactgactgcagacaaatcctccaacacagtccacattcaactcagcagcctgacatctgaggactctgcggtctatttctgtgccctatctactcttattcacgggacctggttttcttattggggccaagggactctggtcactgtctcttccggaggtggtggctccgaggtgcagctgctcgagtctggaggaggattggagcagcctggagggtcattgaaactctcatgtgcagcctctggattcaccttcaattcgtacgccatgaactgggtccgccaggctccaggaaagggtttggaatgggttgctcgcataagaagtaaatataataattatgcaacatattatgccgattcagtgaaagggaggttcaccatctccagagatgattcaaaaaacactgcctatctacaaatgaacaacttgaaaactgaggacactgccgtgtactactgtgtgagacatgggaacttcggtaatagctacctatccttctgggcttactggggccaagggactctggtcaccgtctcctcaggtggtggtggttctggcggcggcggctccggtggtggtggttctgagctcgttgtgactcaggaaccttcactcaccgtatcacctggtggaacagtcacactcacttgtggctcctcgactggggctgttacatctggctactacccaaactgggtccaacaaaaaccaggtcaggcaccccgtggtctaataggtgggactaagttcctcgcccccggtactcctgccagattctcaggctccctgcttggaggcaaggctgccctcaccctctcaggggtacagccagaggatgaggcagaatattactgtgctctatggtacagcaaccgctgggtgttcggtggaggaaccaaactgactgtccta

SEQ ID NO: 299 - protein, 500 aa, Artificial
  unknown organism
DIVLTQSPASLPVSLGQRATISCRASQSVSSSTYSYIHWYQQKPGQPPKLLITYASNLESGVPARFSGSGSGTDFTLDIHPVEEDDSSTYYCQHSWEIPFTFGSGTKLEIKGGGGSGGGGSGGGGSQVQLQQSGPDLVKPGASVKMSCKASGHTFTDCVIIWVKQRAGQGLEWIGQIYPGTGRSYYNEIFKGKATLTADKSSNTVHIQLSSLTSEDSAVYFCALSTLIHGTWFSYWGQGTLVTVSSGGGGSEVQLLESGGGLVQPGGSLKLSCAASGFTFNRYAMNWVRQAPGKGLEWVARIRSKYNNYATYYADSVKGRFTISRDDSKNTAYLQMNNLKTEDTAVYYCVRHGNFGNSYLSYFAYWGQGTLVTVSSGGGGSGGGGSGGGGSELVVTQEPSLTVSPGGTVTLTCGSSTGAVTSGYYPNWVQQKPGQAPRGLIGGTKFLAPGTPARFSGSLLGGKAALTLSGVQPEDEAEYYCALWYSNRWVFGGGTKLTVL

SEQ ID NO: 300 - DNA, 1500 bp, Artificial
  unknown organism
gacattgtgctgacacagtctcctgcttccttacctgtgtctctggggcagagggccaccatctcatgcagggccagccaaagtgtcagttcatctacttatagttatatacactggtaccaacagaaaccaggacagccacccaaactcctcatcacgtatgcatccaacctagaatctggggtccctgccaggttcagtggcagtgggtctgggacagacttcaccctcgacatccatcctgtggaggaggatgattcttcaacatattactgtcagcacagttgggagattccatttacgttcggctcggggacaaagttggaaataaaaggtggtggtggttctggcggcggcggctccggtggtggtggttctcaggttcagctgcagcagtctggacctgatctggtgaagcctggggcctcagtgaagatgtcctgcaaggcttctggacacactttcactgactgtgttataatctgggtgaaacagagagctggacagggccttgagtggattggacagatttatccagggactggtcgttcttactacaatgagattttcaagggcaaggccacactgactgcagacaaatcctccaacacagtccacattcaactcagcagcctgacatctgaggactctgcggtctatttctgtgccctatctactcttattcacgggacctggttttcttattggggccaagggactctggtcactgtctcttccggaggtggtggctccgaggtgcagctgctcgagtctggaggaggattggtgcagcctggagggtcattgaaactctcatgtgcagcctctggattcaccttcaatcgctacgccatgaactgggtccgccaggctccaggaaagggtttggaatgggttgctcgcataagaagtaaatataataattatgcaacatattatgccgattcagtgaaagggaggttcaccatctccagagatgattcaaaaaacactgcctatctacaaatgaacaacttgaaaactgaggacactgccgtgtactactgtgtgagacatgggaacttcggtaatagctacttatcctacttcgcttactggggccaagggactctggtcaccgtctcctcaggtggtggtggttctggcggcggcggctccggtggtggtggttctgagctcgttgtgactcaggaaccttcactcaccgtatcacctggtggaacagtcacactcacttgtggctcctcgactggggctgttacatctggctactacccaaactgggtccaacaaaaaccaggtcaggcaccccgtggtctaataggtgggactaagttcctcgcccccggtactcctgccagattctcaggctccctgcttggaggcaaggctgccctcaccctctcaggggtacagccagaggatgaggcagaatattactgtgctctatggtacagcaaccgctgggtgttcggtggaggaaccaaactgactgtccta

SEQ ID NO: 301 - protein, 500 aa, Artificial
  unknown organism
DIVLTQSPASLPVSLGQRATISCRASQSVSSSTYSYIHWYQQKPGQPPKLLITYASNLESGVPARFSGSGSGTDFTLDIHPVEEDDSSTYYCQHSWEIPFTFGSGTKLEIKGGGGSGGGGSGGGGSQVQLQQSGPDLVKPGASVKMSCKASGHTFTDCVIIWVKQRAGQGLEWIGQIYPGTGRSYYNEIFKGKATLTADKSSNTVHIQLSSLTSEDSAVYFCALSTLIHGTWFSYWGQGTLVTVSSGGGGSEVQLLESGGGLVQPGGSLKLSCAASGFTFNVYAMNWVRQAPGKGLEWVARIRSKYNNYATYYADSVKKRFTISRDDSKNTAYLQMNNLKTEDTAVYYCVRHGNFGNSYLSWWAYWGQGTLVTVSSGGGGSGGGGSGGGGSELVVTQEPSLTVSPGGTVTLTCRSSTGAVTSGYYPNWVQQKPGQAPRGLIGATDMRPSGTPARFSGSLLGGKAALTLSGVQPEDEAEYYCALWYSNRWVFGGGTKLTVL

SEQ ID NO: 302 - DNA, 1500 bp, Artificial
  unknown organism
gacattgtgctgacacagtctcctgcttccttacctgtgtctctggggcagagggccaccatctcatgcagggccagccaaagtgtcagttcatctacttatagttatatacactggtaccaacagaaaccaggacagccacccaaactcctcatcacgtatgcatccaacctagaatctggggtccctgccaggttcagtggcagtgggtctgggacagacttcaccctcgacatccatcctgtggaggaggatgattcttcaacatattactgtcagcacagttgggagattccatttacgttcggctcggggacaaagttggaaataaaaggtggtggtggttctggcggcggcggctccggtggtggtggttctcaggttcagctgcagcagtctggacctgatctggtgaagcctggggcctcagtgaagatgtcctgcaaggcttctggacacactttcactgactgtgttataatctgggtgaaacagagagctggacagggccttgagtggattggacagatttatccagggactggtcgttcttactacaatgagattttcaagggcaaggccacactgactgcagacaaatcctccaacacagtccacattcaactcagcagcctgacatctgaggactctgcggtctatttctgtgccctatctactcttattcacgggacctggttttcttattggggccaagggactctggtcactgtctcttccggaggtggtggctccgaggtgcagctgctcgagtctggaggaggattggtgcagcctggagggtcattgaaactctcatgtgcagcctctggattcaccttcaatgtctacgccatgaactgggtccgccaggctccaggaaagggtttggaatgggttgctcgcataagaagtaaatataataattatgcaacatattatgccgattcagtgaaaaagaggttcaccatctccagagatgattcaaaaaacactgcctatctacaaatgaacaacttgaaaactgaggacactgccgtgtactactgtgtgagacatgggaacttcggtaatagctacttatcctggtgggcttactggggccaagggactctggtcaccgtctcctcaggtggtggtggttctggcggcggcggctccggtggtggtggttctgagctcgttgtgactcaggaaccttcactcaccgtatcacctggtggaacagtcacactcacttgtcgctcctcgactggggctgttacatctggctactacccaaactgggtccaacaaaaaccaggtcaggcaccccgtggtctaataggtgccactgacatgaggccctctggtactcctgccagattctcaggctccctgcttggaggcaaggctgccctcaccctctcaggggtacagccagaggatgaggcagaatattactgtgctctatggtacagcaaccgctgggtgttcggtggaggaaccaaactgactgtccta

SEQ ID NO: 303 - protein, 500 aa, Artificial
  unknown organism
DIVLTQSPASLPVSLGQRATISCRASQSVSSSTYSYIHWYQQKPGQPPKLLITYASNLESGVPARFSGSGSGTDFTLDIHPVEEDDSSTYYCQHSWEIPFTFGSGTKLEIKGGGGSGGGGSGGGGSQVQLQQSGPDLVKPGASVKMSCKASGHTFTDCVIIWVKQRAGQGLEWIGQIYPGTGRSYYNEIFKGKATLTADKSSNTVHIQLSSLTSEDSAVYFCALSTLIHGTWFSYWGQGTLVTVSSGGGGSEVQLLESGGGLVQPGGSLKLSCAASGFTFNKYAMNWVRQAPGKGLEWVARIRSKYNNYATYYADSVKSRFTISRDDSKNTAYLQMNNLKTEDTAVYYCVRHGNFGNSYTSYYAYWGQGTLVTVSSGGGGSGGGGSGGGGSELVVTQEPSLTVSPGGTVTLTCGSSTGAVTSGYYPNWVQQKPGQAPRGLIGGTKFLAPGTPARFSGSLLGGKAALTLSGVQPEDEAEYYCALWYSNRWVFGGGTKLTVL

SEQ ID NO: 304 - DNA, 1500 bp, Artificial
  unknown organism
gacattgtgctgacacagtctcctgcttccttacctgtgtctctggggcagagggccaccatctcatgcagggccagccaaagtgtcagttcatctacttatagttatatacactggtaccaacagaaaccaggacagccacccaaactcctcatcacgtatgcatccaacctagaatctggggtccctgccaggttcagtggcagtgggtctgggacagacttcaccctcgacatccatcctgtggaggaggatgattcttcaacatattactgtcagcacagttgggagattccatttacgttcggctcggggacaaagttggaaataaaaggtggtggtggttctggcggcggcggctccggtggtggtggttctcaggttcagctgcagcagtctggacctgatctggtgaagcctggggcctcagtgaagatgtcctgcaaggcttctggacacactttcactgactgtgttataatctgggtgaaacagagagctggacagggccttgagtggattggacagatttatccagggactggtcgttcttactacaatgagattttcaagggcaaggccacactgactgcagacaaatcctccaacacagtccacattcaactcagcagcctgacatctgaggactctgcggtctatttctgtgccctatctactcttattcacgggacctggttttcttattggggccaagggactctggtcactgtctcttccggaggtggtggctccgaggtgcagctgctcgagtctggaggaggattggtgcagcctggagggtcattgaaactctcatgtgcagcctctggattcaccttcaataagtacgccatgaactgggtccgccaggctccaggaaagggtttggaatgggttgctcgcataagaagtaaatataataattatgcaacatattatgccgattcagtgaaatcgaggttcaccatctccagagatgattcaaaaaacactgcctatctacaaatgaacaacttgaaaactgaggacactgccgtgtactactgtgtgagacatgggaacttcggtaatagctacacatcctactacgcttactggggccaagggactctggtcaccgtctcctcaggtggtggtggttctggcggcggcggctccggtggtggtggttctgagctcgttgtgactcaggaaccttcactcaccgtatcacctggtggaacagtcacactcacttgtggctcctcgactggggctgttacatctggctactacccaaactgggtccaacaaaaaccaggtcaggcaccccgtggtctaataggtgggactaagttcctcgcccccggtactcctgccagattctcaggctccctgcttggaggcaaggctgccctcaccctctcaggggtacagccagaggatgaggcagaatattactgtgctctatggtacagcaaccgctgggtgttcggtggaggaaccaaactgactgtccta

SEQ ID NO: 305 - protein, 500 aa, Artificial
  unknown organism
DIVLTQSPASLPVSLGQRATISCRASQSVSSSTYSYIHWYQQKPGQPPKLLITYASNLESGVPARFSGSGSGTDFTLDIHPVEEDDSSTYYCQHSWEIPFTFGSGTKLEIKGGGGSGGGGSGGGGSQVQLQQSGPDLVKPGASVKMSCKASGHTFTDCVIIWVKQRAGQGLEWIGQIYPGTGRSYYNEIFKGKATLTADKSSNTVHIQLSSLTSEDSAVYFCALSTLIHGTWFSYWGQGTLVTVSSGGGGSEVQLLESGGGLVQPGGSLKLSCAASGFTFNGYAMNWVRQAPGKGLEWVARIRSKYNNYATYYADSVKERFTISRDDSKNTAYLQMNNLKTEDTAVYYCVRHRNFGNSYLSWFAYWGQGTLVTVSSGGGGSGGGGSGGGGSELVVTQEPSLTVSPGGTVTLTCRSSTGAVTSGYYPNWVQQKPGQAPRGLIGATDMRPSGTPARFSGSLLGGKAALTLSGVQPEDEAEYYCALWYSNRWVFGGGTKLTVL

SEQ ID NO: 306 - DNA, 1500 bp, Artificial
  unknown organism
gacattgtgctgacacagtctcctgcttccttacctgtgtctctggggcagagggccaccatctcatgcagggccagccaaagtgtcagttcatctacttatagttatatacactggtaccaacagaaaccaggacagccacccaaactcctcatcacgtatgcatccaacctagaatctggggtccctgccaggttcagtggcagtgggtctgggacagacttcaccctcgacatccatcctgtggaggaggatgattcttcaacatattactgtcagcacagttgggagattccatttacgttcggctcggggacaaagttggaaataaaaggtggtggtggttctggcggcggcggctccggtggtggtggttctcaggttcagctgcagcagtctggacctgatctggtgaagcctggggcctcagtgaagatgtcctgcaaggcttctggacacactttcactgactgtgttataatctgggtgaaacagagagctggacagggccttgagtggattggacagatttatccagggactggtcgttcttactacaatgagattttcaagggcaaggccacactgactgcagacaaatcctccaacacagtccacattcaactcagcagcctgacatctgaggactctgcggtctatttctgtgccctatctactcttattcacgggacctggttttcttattggggccaagggactctggtcactgtctcttccggaggtggtggctccgaggtgcagctgctcgagtctggaggaggattggtgcagcctggagggtcattgaaactctcatgtgcagcctctggattcaccttcaatggctacgccatgaactgggtccgccaggctccaggaaagggtttggaatgggttgctcgcataagaagtaaatataataattatgcaacatattatgccgattcagtgaaagagaggttcaccatctccagagatgattcaaaaaacactgcctatctacaaatgaacaacttgaaaactgaggacactgccgtgtactactgtgtgagacataggaacttcggtaatagctacttatcctggttcgcttactggggccaagggactctggtcaccgtctcctcaggtggtggtggttctggcggcggcggctccggtggtggtggttctgagctcgttgtgactcaggaaccttcactcaccgtatcacctggtggaacagtcacactcacttgtcgctcctcgactggggctgttacatctggctactacccaaactgggtccaacaaaaaccaggtcaggcaccccgtggtctaataggtgccactgacatgaggccctctggtactcctgccagattctcaggctccctgcttggaggcaaggctgccctcaccctctcaggggtacagccagaggatgaggcagaatattactgtgctctatggtacagcaaccgctgggtgttcggtggaggaaccaaactgactgtccta

SEQ ID NO: 307 - protein, 500 aa, Artificial
  unknown organism
DIVLTQSPASLPVSLGQRATISCRASQSVSSSTYSYIHWYQQKPGQPPKLLITYASNLESGVPARFSGSGSGTDFTLDIHPVEEDDSSTYYCQHSWEIPFTFGSGTKLEIKGGGGSGGGGSGGGGSQVQLQQSGPDLVKPGASVKMSCKASGHTFTDCVIIWVKQRAGQGLEWIGQIYPGTGRSYYNEIFKGKATLTADKSSNTVHIQLSSLTSEDSAVYFCALSTLIHGTWFSYWGQGTLVTVSSGGGGSEVQLLESGGGLVQPGGSLKLSCAASGFTFNVYAMNWVRQAPGKGLEWVARIRSKYNNYATYYADSVKKRFTISRDDSKNTAYLQMNNLKTEDTAVYYCVRHGNFGNSYISWWAYWGQGTLVTVSSGGGGSGGGGSGGGGSELVVTQEPSLTVSPGGTVTLTCGSSTGAVTSGYYPNWVQQKPGQAPRGLIGGTKFLAPGTPARFSGSLLGGKAALTLSGVQPEDEAEYYCALWYSNRWVFGGGTKLTVL

SEQ ID NO: 308 - DNA, 1500 bp, Artificial
  unknown organism
gacattgtgctgacacagtctcctgcttccttacctgtgtctctggggcagagggccaccatctcatgcagggccagccaaagtgtcagttcatctacttatagttatatacactggtaccaacagaaaccaggacagccacccaaactcctcatcacgtatgcatccaacctagaatctggggtccctgccaggttcagtggcagtgggtctgggacagacttcaccctcgacatccatcctgtggaggaggatgattcttcaacatattactgtcagcacagttgggagattccatttacgttcggctcggggacaaagttggaaataaaaggtggtggtggttctggcggcggcggctccggtggtggtggttctcaggttcagctgcagcagtctggacctgatctggtgaagcctggggcctcagtgaagatgtcctgcaaggcttctggacacactttcactgactgtgttataatctgggtgaaacagagagctggacagggccttgagtggattggacagatttatccagggactggtcgttcttactacaatgagattttcaagggcaaggccacactgactgcagacaaatcctccaacacagtccacattcaactcagcagcctgacatctgaggactctgcggtctatttctgtgccctatctactcttattcacgggacctggttttcttattggggccaagggactctggtcactgtctcttccggaggtggtggctccgaggtgcagctgctcgagtctggaggaggattggtgcagcctggagggtcattgaaactctcatgtgcagcctctggattcaccttcaatgtgtacgccatgaactgggtccgccaggctccaggaaagggtttggaatgggttgctcgcataagaagtaaatataataattatgcaacatattatgccgattcagtgaaaaagaggttcaccatctccagagatgattcaaaaaacactgcctatctacaaatgaacaacttgaaaactgaggacactgccgtgtactactgtgtgagacatgggaacttcggtaatagctacatatcctggtgggcttactggggccaagggactctggtcaccgtctcctcaggtggtggtggttctggcggcggcggctccggtggtggtggttctgagctcgttgtgactcaggaaccttcactcaccgtatcacctggtggaacagtcacactcacttgtggctcctcgactggggctgttacatctggctactacccaaactgggtccaacaaaaaccaggtcaggcaccccgtggtctaataggtgggactaagttcctcgcccccggtactcctgccagattctcaggctccctgcttggaggcaaggctgccctcaccctctcaggggtacagccagaggatgaggcagaatattactgtgctctatggtacagcaaccgctgggtgttcggtggaggaaccaaactgactgtccta

SEQ ID NO: 309 - protein, 500 aa, Artificial
  unknown organism
QVQLVQSGAEVKRPGASMKVSCKASGYTFTNYYIHWVRQAPGQGLEWMGWINPNSGATNYAQKFQGRVTMTRDTSTSTVYMELSSLRSEDTAVYYCAKSWVSWFASWGQGTLVTVSSGGGGSGGGGSGGGGSDIVMTQSPDSLAVSLGERATINCKSSQSVLNSSNNRNYLAWYQQKPGQPPKLLIYWASTRESGVPDRFSGSGSGTDFTLTISGLQAEDVAVYYCQQHYSTPFTFGPGTKVDIKSGGGGSEVQLVESGGGLVQPGGSLKLSCAASGFTFNKYAMNWVRQAPGKGLEWVARIRSKYNNYATYYADSVKDRFTISRDDSKNTAYLQMNNLKTEDTAVYYCVRHGNFGNSYISYWAYWGQGTLVTVSSGGGGSGGGGSGGGGSQTVVTQEPSLTVSPGGTVTLTCGSSTGAVTSGYYPNWVQQKPGQAPRGLIGGTKFLAPGTPARFSGSLLGGKAALTLSGVQPEDEAEYYCALWYSNRWVFGGGTKLTVL

SEQ ID NO: 310 - DNA, 1500 bp, Artificial
  unknown organism
caggtgcagctggtccagtctggggctgaggtgaagaggcctggggcctcaatgaaggtctcctgcaaggcttctgggtacaccttcaccaactactatatacactgggtgcgacaggcccctggacaaggtcttgagtggatgggttggatcaaccctaacagtggtgccacaaactatgcacagaagttccagggcagagtcaccatgaccagggacacgtccacgagcacagtctacatggagctgagcagcctgagatctgaggacacggccgtgtattactgtgcgaaatcctgggtctcctggtttgcttcctggggtcaaggaaccttggtcaccgtctcctcaggtggtggtggttctggcggcggcggctccggtggtggtggttctgatatcgtgatgacccagtctccagactccctggctgtgtctctgggcgagagggccaccatcaactgcaagtccagccagagtgttttaaacagctccaacaataggaactacttagcttggtaccagcagaaaccaggacagcctcctaagctgctcatttactgggcatctacccgggaatccggggtccctgaccgattcagtggcagcgggtctgggacagatttcactctcaccatcagtggcctgcaggctgaagatgtggcagtttattactgtcagcaacattatagtactccattcacttttggccctgggaccaaagtggatatcaaatccggaggtggtggatccgaggtgcagctggtcgagtctggaggaggattggtgcagcctggagggtcattgaaactctcatgtgcagcctctggattcaccttcaataagtacgccatgaactgggtccgccaggctccaggaaagggtttggaatgggttgctcgcataagaagtaaatataataattatgcaacatattatgccgattcagtgaaagacaggttcaccatctccagagatgattcaaaaaacactgcctatctacaaatgaacaacttgaaaactgaggacactgccgtgtactactgtgtgagacatgggaacttcggtaatagctacatatcctactgggcttactggggccaagggactctggtcaccgtctcctcaggtggtggtggttctggcggcggcggctccggtggtggtggttctcagactgttgtgactcaggaaccttcactcaccgtatcacctggtggaacagtcacactcacttgtggctcctcgactggggctgttacatctggctactacccaaactgggtccaacaaaaaccaggtcaggcaccccgtggtctaataggtgggactaagttcctcgcccccggtactcctgccagattctcaggctccctgcttggaggcaaggctgccctcaccctctcaggggtacagccagaggatgaggcagaatattactgtgctctatggtacagcaaccgctgggtgttcggtggaggaaccaaactgactgtccta

SEQ ID NO: 311 - protein, 500 aa, Artificial
  unknown organism
QVQLVQSGAEVKRPGASMKVSCKASGYTFTNYYIHWVRQAPGQGLEWMGWINPNSGATNYAQKFQGRVTMTRDTSTSTVYMELSSLRSEDTAVYYCAKSWVSWFASWGQGTLVTVSSGGGGSGGGGSGGGGSDIVMTQSPDSLAVSLGERATINCKSSQSVLNSSNNRNYLAWYQQKPGQPPKLLIYWASTRESGVPDRFSGSGSGTDFTLTISGLQAEDVAVYYCQQHYSTPFTFGPGTKVDIKSGGGGSEVQLVESGGGLVQPGGSLKLSCAASGFTFNSYAMNWVRQAPGKGLEWVARIRSKYNNYATYYADSVKGRFTISRDDSKNTAYLQMNNLKTEDTAVYYCVRHGNFGNSYVSWWAYWGQGTLVTVSSGGGGSGGGGSGGGGSQTVVTQEPSLTVSPGGTVTLTCGSSTGAVTSGNYPNWVQQKPGQAPRGLIGGTKFLAPGTPARFSGSLLGGKAALTLSGVQPEDEAEYYCVLWYSNRWVFGGGTKLTVL

SEQ ID NO: 312 - DNA, 1500 bp, Artificial
  unknown organism
caggtgcagctggtccagtctggggctgaggtgaagaggcctggggcctcaatgaaggtctcctgcaaggcttctgggtacaccttcaccaactactatatacactgggtgcgacaggcccctggacaaggtcttgagtggatgggttggatcaaccctaacagtggtgccacaaactatgcacagaagttccagggcagagtcaccatgaccagggacacgtccacgagcacagtctacatggagctgagcagcctgagatctgaggacacggccgtgtattactgtgcgaaatcctgggtctcctggtttgcttcctggggtcaaggaaccttggtcaccgtctcctcaggtggtggtggttctggcggcggcggctccggtggtggtggttctgatatcgtgatgacccagtctccagactccctggctgtgtctctgggcgagagggccaccatcaactgcaagtccagccagagtgttttaaacagctccaacaataggaactacttagcttggtaccagcagaaaccaggacagcctcctaagctgctcatttactgggcatctacccgggaatccggggtccctgaccgattcagtggcagcgggtctgggacagatttcactctcaccatcagtggcctgcaggctgaagatgtggcagtttattactgtcagcaacattatagtactccattcacttttggccctgggaccaaagtggatatcaaatccggaggtggtggatccgaggtgcagctggtcgagtctggaggaggattggtgcagcctggagggtcattgaaactctcatgtgcagcctctggattcaccttcaatagctacgccatgaactgggtccgccaggctccaggaaagggtttggaatgggttgctcgcataagaagtaaatataataattatgcaacatattatgccgattcagtgaaaggcaggttcaccatctccagagatgattcaaaaaacactgcctatctacaaatgaacaacttgaaaactgaggacactgccgtgtactactgtgtgagacatgggaacttcggtaatagctacgtttcctggtgggcttactggggccaagggactctggtcaccgtctcctcaggtggtggtggttctggcggcggcggctccggtggtggtggttctcagactgttgtgactcaggaaccttcactcaccgtatcacctggtggaacagtcacactcacttgtggctcctcgactggggctgttacatctggcaactacccaaactgggtccaacaaaaaccaggtcaggcaccccgtggtctaataggtgggactaagttcctcgcccccggtactcctgccagattctcaggctccctgcttggaggcaaggctgccctcaccctctcaggggtacagccagaggatgaggcagaatattactgtgttctatggtacagcaaccgctgggtgttcggtggaggaaccaaactgactgtccta

SEQ ID NO: 313 - protein, 500 aa, Artificial
  unknown organism
QVQLVQSGAEVKRPGASMKVSCKASGYTFTNYYIHWVRQAPGQGLEWMGWINPNSGATNYAQKFQGRVTMTRDTSTSTVYMELSSLRSEDTAVYYCAKSWVSWFASWGQGTLVTVSSGGGGSGGGGSGGGGSDIVMTQSPDSLAVSLGERATINCKSSQSVLNSSNNRNYLAWYQQKPGQPPKLLIYWASTRESGVPDRFSGSGSGTDFTLTISGLQAEDVAVYYCQQHYSTPFTFGPGTKVDIKSGGGGSEVQLVESGGGLVQPGGSLKLSCAASGFTFNKYAMNWVRQAPGKGLEWVARIRSKYNNYATYYADSVKDRFTISRDDSKNTAYLQMNNLKTEDTAVYYCVRHGNFGNSYISYWAYWGQGTLVTVSSGGGGSGGGGSGGGGSQTVVTQEPSLTVSPGGTVTLTCGSSTGAVTSGNYPNWVQQKPGQAPRGLIGGTKFLAPGTPARFSGSLLGGKAALTLSGVQPEDEAEYYCVLWYSNRWVFGGGTKLTVL

SEQ ID NO: 314 - DNA, 1500 bp, Artificial
  unknown organism
caggtgcagctggtccagtctggggctgaggtgaagaggcctggggcctcaatgaaggtctcctgcaaggcttctgggtacaccttcaccaactactatatacactgggtgcgacaggcccctggacaaggtcttgagtggatgggttggatcaaccctaacagtggtgccacaaactatgcacagaagttccagggcagagtcaccatgaccagggacacgtccacgagcacagtctacatggagctgagcagcctgagatctgaggacacggccgtgtattactgtgcgaaatcctgggtctcctggtttgcttcctggggtcaaggaaccttggtcaccgtctcctcaggtggtggtggttctggcggcggcggctccggtggtggtggttctgatatcgtgatgacccagtctccagactccctggctgtgtctctgggcgagagggccaccatcaactgcaagtccagccagagtgttttaaacagctccaacaataggaactacttagcttggtaccagcagaaaccaggacagcctcctaagctgctcatttactgggcatctacccgggaatccggggtccctgaccgattcagtggcagcgggtctgggacagatttcactctcaccatcagtggcctgcaggctgaagatgtggcagtttattactgtcagcaacattatagtactccattcacttttggccctgggaccaaagtggatatcaaatccggaggtggtggatccgaggtgcagctggtcgagtctggaggaggattggtgcagcctggagggtcattgaaactctcatgtgcagcctctggattcaccttcaataagtacgccatgaactgggtccgccaggctccaggaaagggtttggaatgggttgctcgcataagaagtaaatataataattatgcaacatattatgccgattcagtgaaagacaggttcaccatctccagagatgattcaaaaaacactgcctatctacaaatgaacaacttgaaaactgaggacactgccgtgtactactgtgtgagacatgggaacttcggtaatagctacatatcctactgggcttactggggccaagggactctggtcaccgtctcctcaggtggtggtggttctggcggcggcggctccggtggtggtggttctcagactgttgtgactcaggaaccttcactcaccgtatcacctggtggaacagtcacactcacttgtggctcctcgactggggctgttacatctggcaactacccaaactgggtccaacaaaaaccaggtcaggcaccccgtggtctaataggtgggactaagttcctcgcccccggtactcctgccagattctcaggctccctgcttggaggcaaggctgccctcaccctctcaggggtacagccagaggatgaggcagaatattactgtgttctatggtacagcaaccgctgggtgttcggtggaggaaccaaactgactgtccta

SEQ ID NO: 315 - protein, 500 aa, Artificial
  unknown organism
QVQLVQSGAEVKRPGASMKVSCKASGYTFTNYYIHWVRQAPGQGLEWMGWINPNSGATNYAQKFQGRVTMTRDTSTSTVYMELSSLRSEDTAVYYCAKSWVSWFASWGQGTLVTVSSGGGGSGGGGSGGGGSELVMTQSPDSLAVSLGERATINCKSSQSVLNSSNNRNYLAWYQQKPGQPPKLLIYWASTRESGVPDRFSGSGSGTDFTLTISGLQAEDVAVYYCQQHYSTPFTFGPGTKVDIKSGGGGSEVQLLESGGGLVQPGGSLKLSCAASGFTFNIYAMNWVRQAPGKGLEWVARIRSKYNNYATYYADSVKSRFTISRDDSKNTAYLQMNNLKTEDTAVYYCVRHGNFGNSYVSFFAYWGQGTLVTVSSGGGGSGGGGSGGGGSELVVTQEPSLTVSPGGTVTLTCGSSTGAVTSGYYPNWVQQKPGQAPRGLIGGTKFLAPGTPARFSGSLLGGKAALTLSGVQPEDEAEYYCALWYSNRWVFGGGTKLTVL

SEQ ID NO: 316 - DNA, 1500 bp, Artificial
  unknown organism
caggtgcagctggtccagtctggggctgaggtgaagaggcctggggcctcaatgaaggtctcctgcaaggcttctgggtacaccttcaccaactactatatacactgggtgcgacaggcccctggacaaggtcttgagtggatgggttggatcaaccctaacagtggtgccacaaactatgcacagaagttccagggcagagtcaccatgaccagggacacgtccacgagcacagtctacatggagctgagcagcctgagatctgaggacacggccgtgtattactgtgcgaaatcctgggtctcctggtttgcttcctggggtcaaggaaccttggtcaccgtctcctcaggtggtggtggttctggcggcggcggctccggtggtggtggttctgagctcgtgatgacccagtctccagactccctggctgtgtctctgggcgagagggccaccatcaactgcaagtccagccagagtgttttaaacagctccaacaataggaactacttagcttggtaccagcagaaaccaggacagcctcctaagctgctcatttactgggcatctacccgggaatccggggtccctgaccgattcagtggcagcgggtctgggacagatttcactctcaccatcagtggcctgcaggctgaagatgtggcagtttattactgtcagcaacattatagtactccattcacttttggccctgggaccaaagtggatatcaaatccggaggtggtggatccgaggtgcagctgctcgagtctggaggaggattggtgcagcctggagggtcattgaaactctcatgtgcagcctctggattcaccttcaatatctacgccatgaactgggtccgccaggctccaggaaagggtttggaatgggttgctcgcataagaagtaaatataataattatgcaacatattatgccgattcagtgaaaagcaggttcaccatctccagagatgattcaaaaaacactgcctatctacaaatgaacaacttgaaaactgaggacactgccgtgtactactgtgtgagacatgggaacttcggtaatagctacgtatccttcttcgcttactggggccaagggactctggtcaccgtctcctcaggtggtggtggttctggcggcggcggctccggtggtggtggttctgagctcgttgtgactcaggaaccttcactcaccgtatcacctggtggaacagtcacactcacttgtggctcctcgactggggctgttacatctggctactacccaaactgggtccaacaaaaaccaggtcaggcaccccgtggtctaataggtgggactaagttcctcgcccccggtactcctgccagattctcaggctccctgcttggaggcaaggctgccctcaccctctcaggggtacagccagaggatgaggcagaatattactgtgctctatggtacagcaaccgctgggtgttcggtggaggaaccaaactgactgtccta

SEQ ID NO: 317 - protein, 500 aa, Artificial
  unknown organism
QVQLVQSGAEVKRPGASMKVSCKASGYTFTNYYIHWVRQAPGQGLEWMGWINPNSGATNYAQKFQGRVTMTRDTSTSTVYMELSSLRSEDTAVYYCAKSWVSWFASWGQGTLVTVSSGGGGSGGGGSGGGGSELVMTQSPDSLAVSLGERATINCKSSQSVLNSSNNRNYLAWYQQKPGQPPKLLIYWASTRESGVPDRFSGSGSGTDFTLTISGLQAEDVAVYYCQQHYSTPFTFGPGTKVDIKSGGGGSEVQLLESGGGLVQPGGSLKLSCAASGFTFNKYAMNWVRQAPGKGLEWVARIRSKYNNYATYYADSVKDRFTISRDDSKNTAYLQMNNLKTEDTAVYYCVRHGNFGNSYISYWAYWGQGTLVTVSSGGGGSGGGGSGGGGSELVVTQEPSLTVSPGGTVTLTCGSSTGAVTSGYYPNWVQQKPGQAPRGLIGGTKFLAPGTPARFSGSLLGGKAALTLSGVQPEDEAEYYCALWYSNRWVFGGGTKLTVL

SEQ ID NO: 318 - DNA, 1500 bp, Artificial
  unknown organism
caggtgcagctggtccagtctggggctgaggtgaagaggcctggggcctcaatgaaggtctcctgcaaggcttctgggtacaccttcaccaactactatatacactgggtgcgacaggcccctggacaaggtcttgagtggatgggttggatcaaccctaacagtggtgccacaaactatgcacagaagttccagggcagagtcaccatgaccagggacacgtccacgagcacagtctacatggagctgagcagcctgagatctgaggacacggccgtgtattactgtgcgaaatcctgggtctcctggtttgcttcctggggtcaaggaaccttggtcaccgtctcctcaggtggtggtggttctggcggcggcggctccggtggtggtggttctgagctcgtgatgacccagtctccagactccctggctgtgtctctgggcgagagggccaccatcaactgcaagtccagccagagtgttttaaacagctccaacaataggaactacttagcttggtaccagcagaaaccaggacagcctcctaagctgctcatttactgggcatctacccgggaatccggggtccctgaccgattcagtggcagcgggtctgggacagatttcactctcaccatcagtggcctgcaggctgaagatgtggcagtttattactgtcagcaacattatagtactccattcacttttggccctgggaccaaagtggatatcaaatccggaggtggtggatccgaggtgcagctgctcgagtctggaggaggattggtgcagcctggagggtcattgaaactctcatgtgcagcctctggattcaccttcaataagtacgccatgaactgggtccgccaggctccaggaaagggtttggaatgggttgctcgcataagaagtaaatataataattatgcaacatattatgccgattcagtgaaagacaggttcaccatctccagagatgattcaaaaaacactgcctatctacaaatgaacaacttgaaaactgaggacactgccgtgtactactgtgtgagacatgggaacttcggtaatagctacatatcctactgggcttactggggccaagggactctggtcaccgtctcctcaggtggtggtggttctggcggcggcggctccggtggtggtggttctgagctcgttgtgactcaggaaccttcactcaccgtatcacctggtggaacagtcacactcacttgtggctcctcgactggggctgttacatctggctactacccaaactgggtccaacaaaaaccaggtcaggcaccccgtggtctaataggtgggactaagttcctcgcccccggtactcctgccagattctcaggctccctgcttggaggcaaggctgccctcaccctctcaggggtacagccagaggatgaggcagaatattactgtgctctatggtacagcaaccgctgggtgttcggtggaggaaccaaactgactgtccta

SEQ ID NO: 319 - protein, 500 aa, Artificial
  unknown organism
QVQLVQSGAEVKRPGASMKVSCKASGYTFTNYYIHWVRQAPGQGLEWMGWINPNSGATNYAQKFQGRVTMTRDTSTSTVYMELSSLRSEDTAVYYCAKSWVSWFASWGQGTLVTVSSGGGGSGGGGSGGGGSELVMTQSPDSLAVSLGERATINCKSSQSVLNSSNNRNYLAWYQQKPGQPPKLLIYWASTRESGVPDRFSGSGSGTDFTLTISGLQAEDVAVYYCQQHYSTPFTFGPGTKVDIKSGGGGSEVQLLESGGGLEQPGGSLKLSCAASGFTFNSYAMNWVRQAPGKGLEWVARIRSKYNNYATYYADSVKGRFTISRDDSKNTAYLQMNNLKTEDTAVYYCVRHGNFGNSYLSFWAYWGQGTLVTVSSGGGGSGGGGSGGGGSELVVTQEPSLTVSPGGTVTLTCGSSTGAVTSGYYPNWVQQKPGQAPRGLIGGTKFLAPGTPARFSGSLLGGKAALTLSGVQPEDEAEYYCALWYSNRWVFGGGTKLTVL

SEQ ID NO: 320 - DNA, 1500 bp, Artificial
  unknown organism
caggtgcagctggtccagtctggggctgaggtgaagaggcctggggcctcaatgaaggtctcctgcaaggcttctgggtacaccttcaccaactactatatacactgggtgcgacaggcccctggacaaggtcttgagtggatgggttggatcaaccctaacagtggtgccacaaactatgcacagaagttccagggcagagtcaccatgaccagggacacgtccacgagcacagtctacatggagctgagcagcctgagatctgaggacacggccgtgtattactgtgcgaaatcctgggtctcctggtttgcttcctggggtcaaggaaccttggtcaccgtctcctcaggtggtggtggttctggcggcggcggctccggtggtggtggttctgagctcgtgatgacccagtctccagactccctggctgtgtctctgggcgagagggccaccatcaactgcaagtccagccagagtgttttaaacagctccaacaataggaactacttagcttggtaccagcagaaaccaggacagcctcctaagctgctcatttactgggcatctacccgggaatccggggtccctgaccgattcagtggcagcgggtctgggacagatttcactctcaccatcagtggcctgcaggctgaagatgtggcagtttattactgtcagcaacattatagtactccattcacttttggccctgggaccaaagtggatatcaaatccggaggtggtggatccgaggtgcagctgctcgagtctggaggaggattggagcagcctggagggtcattgaaactctcatgtgcagcctctggattcaccttcaattcgtacgccatgaactgggtccgccaggctccaggaaagggtttggaatgggttgctcgcataagaagtaaatataataattatgcaacatattatgccgattcagtgaaagggaggttcaccatctccagagatgattcaaaaaacactgcctatctacaaatgaacaacttgaaaactgaggacactgccgtgtactactgtgtgagacatgggaacttcggtaatagctacctatccttctgggcttactggggccaagggactctggtcaccgtctcctcaggtggtggtggttctggcggcggcggctccggtggtggtggttctgagctcgttgtgactcaggaaccttcactcaccgtatcacctggtggaacagtcacactcacttgtggctcctcgactggggctgttacatctggctactacccaaactgggtccaacaaaaaccaggtcaggcaccccgtggtctaataggtgggactaagttcctcgcccccggtactcctgccagattctcaggctccctgcttggaggcaaggctgccctcaccctctcaggggtacagccagaggatgaggcagaatattactgtgctctatggtacagcaaccgctgggtgttcggtggaggaaccaaactgactgtccta

SEQ ID NO: 321 - protein, 500 aa, Artificial
  unknown organism
QVQLVQSGAEVKRPGASMKVSCKASGYTFTNYYIHWVRQAPGQGLEWMGWINPNSGATNYAQKFQGRVTMTRDTSTSTVYMELSSLRSEDTAVYYCAKSWVSWFASWGQGTLVTVSSGGGGSGGGGSGGGGSELVMTQSPDSLAVSLGERATINCKSSQSVLNSSNNRNYLAWYQQKPGQPPKLLIYWASTRESGVPDRFSGSGSGTDFTLTISGLQAEDVAVYYCQQHYSTPFTFGPGTKVDIKSGGGGSEVQLLESGGGLVQPGGSLKLSCAASGFTFNRYAMNWVRQAPGKGLEWVARIRSKYNNYATYYADSVKGRFTISRDDSKNTAYLQMNNLKTEDTAVYYCVRHGNFGNSYLSYFAYWGQGTLVTVSSGGGGSGGGGSGGGGSELVVTQEPSLTVSPGGTVTLTCGSSTGAVTSGYYPNWVQQKPGQAPRGLIGGTKFLAPGTPARFSGSLLGGKAALTLSGVQPEDEAEYYCALWYSNRWVFGGGTKLTVL

SEQ ID NO: 322 - DNA, 1500 bp, Artificial
  unknown organism
caggtgcagctggtccagtctggggctgaggtgaagaggcctggggcctcaatgaaggtctcctgcaaggcttctgggtacaccttcaccaactactatatacactgggtgcgacaggcccctggacaaggtcttgagtggatgggttggatcaaccctaacagtggtgccacaaactatgcacagaagttccagggcagagtcaccatgaccagggacacgtccacgagcacagtctacatggagctgagcagcctgagatctgaggacacggccgtgtattactgtgcgaaatcctgggtctcctggtttgcttcctggggtcaaggaaccttggtcaccgtctcctcaggtggtggtggttctggcggcggcggctccggtggtggtggttctgagctcgtgatgacccagtctccagactccctggctgtgtctctgggcgagagggccaccatcaactgcaagtccagccagagtgttttaaacagctccaacaataggaactacttagcttggtaccagcagaaaccaggacagcctcctaagctgctcatttactgggcatctacccgggaatccggggtccctgaccgattcagtggcagcgggtctgggacagatttcactctcaccatcagtggcctgcaggctgaagatgtggcagtttattactgtcagcaacattatagtactccattcacttttggccctgggaccaaagtggatatcaaatccggaggtggtggatccgaggtgcagctgctcgagtctggaggaggattggtgcagcctggagggtcattgaaactctcatgtgcagcctctggattcaccttcaatcgctacgccatgaactgggtccgccaggctccaggaaagggtttggaatgggttgctcgcataagaagtaaatataataattatgcaacatattatgccgattcagtgaaagggaggttcaccatctccagagatgattcaaaaaacactgcctatctacaaatgaacaacttgaaaactgaggacactgccgtgtactactgtgtgagacatgggaacttcggtaatagctacttatcctacttcgcttactggggccaagggactctggtcaccgtctcctcaggtggtggtggttctggcggcggcggctccggtggtggtggttctgagctcgttgtgactcaggaaccttcactcaccgtatcacctggtggaacagtcacactcacttgtggctcctcgactggggctgttacatctggctactacccaaactgggtccaacaaaaaccaggtcaggcaccccgtggtctaataggtgggactaagttcctcgcccccggtactcctgccagattctcaggctccctgcttggaggcaaggctgccctcaccctctcaggggtacagccagaggatgaggcagaatattactgtgctctatggtacagcaaccgctgggtgttcggtggaggaaccaaactgactgtccta

SEQ ID NO: 323 - protein, 500 aa, Artificial
  unknown organism
QVQLVQSGAEVKRPGASMKVSCKASGYTFTNYYIHWVRQAPGQGLEWMGWINPNSGATNYAQKFQGRVTMTRDTSTSTVYMELSSLRSEDTAVYYCAKSWVSWFASWGQGTLVTVSSGGGGSGGGGSGGGGSELVMTQSPDSLAVSLGERATINCKSSQSVLNSSNNRNYLAWYQQKPGQPPKLLIYWASTRESGVPDRFSGSGSGTDFTLTISGLQAEDVAVYYCQQHYSTPFTFGPGTKVDIKSGGGGSEVQLLESGGGLVQPGGSLKLSCAASGFTFNVYAMNWVRQAPGKGLEWVARIRSKYNNYATYYADSVKKRFTISRDDSKNTAYLQMNNLKTEDTAVYYCVRHGNFGNSYLSWWAYWGQGTLVTVSSGGGGSGGGGSGGGGSELVVTQEPSLTVSPGGTVTLTCRSSTGAVTSGYYPNWVQQKPGQAPRGLIGATDMRPSGTPARFSGSLLGGKAALTLSGVQPEDEAEYYCALWYSNRWVFGGGTKLTVL

SEQ ID NO: 324 - DNA, 1500 bp, Artificial
  unknown organism
caggtgcagctggtccagtctggggctgaggtgaagaggcctggggcctcaatgaaggtctcctgcaaggcttctgggtacaccttcaccaactactatatacactgggtgcgacaggcccctggacaaggtcttgagtggatgggttggatcaaccctaacagtggtgccacaaactatgcacagaagttccagggcagagtcaccatgaccagggacacgtccacgagcacagtctacatggagctgagcagcctgagatctgaggacacggccgtgtattactgtgcgaaatcctgggtctcctggtttgcttcctggggtcaaggaaccttggtcaccgtctcctcaggtggtggtggttctggcggcggcggctccggtggtggtggttctgagctcgtgatgacccagtctccagactccctggctgtgtctctgggcgagagggccaccatcaactgcaagtccagccagagtgttttaaacagctccaacaataggaactacttagcttggtaccagcagaaaccaggacagcctcctaagctgctcatttactgggcatctacccgggaatccggggtccctgaccgattcagtggcagcgggtctgggacagatttcactctcaccatcagtggcctgcaggctgaagatgtggcagtttattactgtcagcaacattatagtactccattcacttttggccctgggaccaaagtggatatcaaatccggaggtggtggatccgaggtgcagctgctcgagtctggaggaggattggtgcagcctggagggtcattgaaactctcatgtgcagcctctggattcaccttcaatgtctacgccatgaactgggtccgccaggctccaggaaagggtttggaatgggttgctcgcataagaagtaaatataataattatgcaacatattatgccgattcagtgaaaaagaggttcaccatctccagagatgattcaaaaaacactgcctatctacaaatgaacaacttgaaaactgaggacactgccgtgtactactgtgtgagacatgggaacttcggtaatagctacttatcctggtgggcttactggggccaagggactctggtcaccgtctcctcaggtggtggtggttctggcggcggcggctccggtggtggtggttctgagctcgttgtgactcaggaaccttcactcaccgtatcacctggtggaacagtcacactcacttgtcgctcctcgactggggctgttacatctggctactacccaaactgggtccaacaaaaaccaggtcaggcaccccgtggtctaataggtgccactgacatgaggccctctggtactcctgccagattctcaggctccctgcttggaggcaaggctgccctcaccctctcaggggtacagccagaggatgaggcagaatattactgtgctctatggtacagcaaccgctgggtgttcggtggaggaaccaaactgactgtccta

SEQ ID NO: 325 - protein, 500 aa, Artificial
  unknown organism
QVQLVQSGAEVKRPGASMKVSCKASGYTFTNYYIHWVRQAPGQGLEWMGWINPNSGATNYAQKFQGRVTMTRDTSTSTVYMELSSLRSEDTAVYYCAKSWVSWFASWGQGTLVTVSSGGGGSGGGGSGGGGSELVMTQSPDSLAVSLGERATINCKSSQSVLNSSNNRNYLAWYQQKPGQPPKLLIYWASTRESGVPDRFSGSGSGTDFTLTISGLQAEDVAVYYCQQHYSTPFTFGPGTKVDIKSGGGGSEVQLLESGGGLVQPGGSLKLSCAASGFTFNKYAMNWVRQAPGKGLEWVARIRSKYNNYATYYADSVKSRFTISRDDSKNTAYLQMNNLKTEDTAVYYCVRHGNFGNSYTSYYAYWGQGTLVTVSSGGGGSGGGGSGGGGSELVVTQEPSLTVSPGGTVTLTCGSSTGAVTSGYYPNWVQQKPGQAPRGLIGGTKFLAPGTPARFSGSLLGGKAALTLSGVQPEDEAEYYCALWYSNRWVFGGGTKLTVL

SEQ ID NO: 326 - DNA, 1500 bp, Artificial
  unknown organism
caggtgcagctggtccagtctggggctgaggtgaagaggcctggggcctcaatgaaggtctcctgcaaggcttctgggtacaccttcaccaactactatatacactgggtgcgacaggcccctggacaaggtcttgagtggatgggttggatcaaccctaacagtggtgccacaaactatgcacagaagttccagggcagagtcaccatgaccagggacacgtccacgagcacagtctacatggagctgagcagcctgagatctgaggacacggccgtgtattactgtgcgaaatcctgggtctcctggtttgcttcctggggtcaaggaaccttggtcaccgtctcctcaggtggtggtggttctggcggcggcggctccggtggtggtggttctgagctcgtgatgacccagtctccagactccctggctgtgtctctgggcgagagggccaccatcaactgcaagtccagccagagtgttttaaacagctccaacaataggaactacttagcttggtaccagcagaaaccaggacagcctcctaagctgctcatttactgggcatctacccgggaatccggggtccctgaccgattcagtggcagcgggtctgggacagatttcactctcaccatcagtggcctgcaggctgaagatgtggcagtttattactgtcagcaacattatagtactccattcacttttggccctgggaccaaagtggatatcaaatccggaggtggtggatccgaggtgcagctgctcgagtctggaggaggattggtgcagcctggagggtcattgaaactctcatgtgcagcctctggattcaccttcaataagtacgccatgaactgggtccgccaggctccaggaaagggtttggaatgggttgctcgcataagaagtaaatataataattatgcaacatattatgccgattcagtgaaatcgaggttcaccatctccagagatgattcaaaaaacactgcctatctacaaatgaacaacttgaaaactgaggacactgccgtgtactactgtgtgagacatgggaacttcggtaatagctacacatcctactacgcttactggggccaagggactctggtcaccgtctcctcaggtggtggtggttctggcggcggcggctccggtggtggtggttctgagctcgttgtgactcaggaaccttcactcaccgtatcacctggtggaacagtcacactcacttgtggctcctcgactggggctgttacatctggctactacccaaactgggtccaacaaaaaccaggtcaggcaccccgtggtctaataggtgggactaagttcctcgcccccggtactcctgccagattctcaggctccctgcttggaggcaaggctgccctcaccctctcaggggtacagccagaggatgaggcagaatattactgtgctctatggtacagcaaccgctgggtgttcggtggaggaaccaaactgactgtccta

SEQ ID NO: 327 - protein, 500 aa, Artificial
  unknown organism
QVQLVQSGAEVKRPGASMKVSCKASGYTFTNYYIHWVRQAPGQGLEWMGWINPNSGATNYAQKFQGRVTMTRDTSTSTVYMELSSLRSEDTAVYYCAKSWVSWFASWGQGTLVTVSSGGGGSGGGGSGGGGSELVMTQSPDSLAVSLGERATINCKSSQSVLNSSNNRNYLAWYQQKPGQPPKLLIYWASTRESGVPDRFSGSGSGTDFTLTISGLQAEDVAVYYCQQHYSTPFTFGPGTKVDIKSGGGGSEVQLLESGGGLVQPGGSLKLSCAASGFTFNGYAMNWVRQAPGKGLEWVARIRSKYNNYATYYADSVKERFTISRDDSKNTAYLQMNNLKTEDTAVYYCVRHRNFGNSYLSWFAYWGQGTLVTVSSGGGGSGGGGSGGGGSELVVTQEPSLTVSPGGTVTLTCRSSTGAVTSGYYPNWVQQKPGQAPRGLIGATDMRPSGTPARFSGSLLGGKAALTLSGVQPEDEAEYYCALWYSNRWVFGGGTKLTVL

SEQ ID NO: 328 - DNA, 1500 bp, Artificial
  unknown organism
caggtgcagctggtccagtctggggctgaggtgaagaggcctggggcctcaatgaaggtctcctgcaaggcttctgggtacaccttcaccaactactatatacactgggtgcgacaggcccctggacaaggtcttgagtggatgggttggatcaaccctaacagtggtgccacaaactatgcacagaagttccagggcagagtcaccatgaccagggacacgtccacgagcacagtctacatggagctgagcagcctgagatctgaggacacggccgtgtattactgtgcgaaatcctgggtctcctggtttgcttcctggggtcaaggaaccttggtcaccgtctcctcaggtggtggtggttctggcggcggcggctccggtggtggtggttctgagctcgtgatgacccagtctccagactccctggctgtgtctctgggcgagagggccaccatcaactgcaagtccagccagagtgttttaaacagctccaacaataggaactacttagcttggtaccagcagaaaccaggacagcctcctaagctgctcatttactgggcatctacccgggaatccggggtccctgaccgattcagtggcagcgggtctgggacagatttcactctcaccatcagtggcctgcaggctgaagatgtggcagtttattactgtcagcaacattatagtactccattcacttttggccctgggaccaaagtggatatcaaatccggaggtggtggatccgaggtgcagctgctcgagtctggaggaggattggtgcagcctggagggtcattgaaactctcatgtgcagcctctggattcaccttcaatggctacgccatgaactgggtccgccaggctccaggaaagggtttggaatgggttgctcgcataagaagtaaatataataattatgcaacatattatgccgattcagtgaaagagaggttcaccatctccagagatgattcaaaaaacactgcctatctacaaatgaacaacttgaaaactgaggacactgccgtgtactactgtgtgagacataggaacttcggtaatagctacttatcctggttcgcttactggggccaagggactctggtcaccgtctcctcaggtggtggtggttctggcggcggcggctccggtggtggtggttctgagctcgttgtgactcaggaaccttcactcaccgtatcacctggtggaacagtcacactcacttgtcgctcctcgactggggctgttacatctggctactacccaaactgggtccaacaaaaaccaggtcaggcaccccgtggtctaataggtgccactgacatgaggccctctggtactcctgccagattctcaggctccctgcttggaggcaaggctgccctcaccctctcaggggtacagccagaggatgaggcagaatattactgtgctctatggtacagcaaccgctgggtgttcggtggaggaaccaaactgactgtccta

SEQ ID NO: 329 - protein, 500 aa, Artificial
  unknown organism
QVQLVQSGAEVKRPGASMKVSCKASGYTFTNYYIHWVRQAPGQGLEWMGWINPNSGATNYAQKFQGRVTMTRDTSTSTVYMELSSLRSEDTAVYYCAKSWVSWFASWGQGTLVTVSSGGGGSGGGGSGGGGSELVMTQSPDSLAVSLGERATINCKSSQSVLNSSNNRNYLAWYQQKPGQPPKLLIYWASTRESGVPDRFSGSGSGTDFTLTISGLQAEDVAVYYCQQHYSTPFTFGPGTKVDIKSGGGGSEVQLLESGGGLVQPGGSLKLSCAASGFTFNVYAMNWVRQAPGKGLEWVARIRSKYNNYATYYADSVKKRFTISRDDSKNTAYLQMNNLKTEDTAVYYCVRHGNFGNSYISWWAYWGQGTLVTVSSGGGGSGGGGSGGGGSELVVTQEPSLTVSPGGTVTLTCGSSTGAVTSGYYPNWVQQKPGQAPRGLIGGTKFLAPGTPARFSGSLLGGKAALTLSGVQPEDEAEYYCALWYSNRWVFGGGTKLTVL

SEQ ID NO: 330 - DNA, 1500 bp, Artificial
  unknown organism
caggtgcagctggtccagtctggggctgaggtgaagaggcctggggcctcaatgaaggtctcctgcaaggcttctgggtacaccttcaccaactactatatacactgggtgcgacaggcccctggacaaggtcttgagtggatgggttggatcaaccctaacagtggtgccacaaactatgcacagaagttccagggcagagtcaccatgaccagggacacgtccacgagcacagtctacatggagctgagcagcctgagatctgaggacacggccgtgtattactgtgcgaaatcctgggtctcctggtttgcttcctggggtcaaggaaccttggtcaccgtctcctcaggtggtggtggttctggcggcggcggctccggtggtggtggttctgagctcgtgatgacccagtctccagactccctggctgtgtctctgggcgagagggccaccatcaactgcaagtccagccagagtgttttaaacagctccaacaataggaactacttagcttggtaccagcagaaaccaggacagcctcctaagctgctcatttactgggcatctacccgggaatccggggtccctgaccgattcagtggcagcgggtctgggacagatttcactctcaccatcagtggcctgcaggctgaagatgtggcagtttattactgtcagcaacattatagtactccattcacttttggccctgggaccaaagtggatatcaaatccggaggtggtggatccgaggtgcagctgctcgagtctggaggaggattggtgcagcctggagggtcattgaaactctcatgtgcagcctctggattcaccttcaatgtgtacgccatgaactgggtccgccaggctccaggaaagggtttggaatgggttgctcgcataagaagtaaatataataattatgcaacatattatgccgattcagtgaaaaagaggttcaccatctccagagatgattcaaaaaacactgcctatctacaaatgaacaacttgaaaactgaggacactgccgtgtactactgtgtgagacatgggaacttcggtaatagctacatatcctggtgggcttactggggccaagggactctggtcaccgtctcctcaggtggtggtggttctggcggcggcggctccggtggtggtggttctgagctcgttgtgactcaggaaccttcactcaccgtatcacctggtggaacagtcacactcacttgtggctcctcgactggggctgttacatctggctactacccaaactgggtccaacaaaaaccaggtcaggcaccccgtggtctaataggtgggactaagttcctcgcccccggtactcctgccagattctcaggctccctgcttggaggcaaggctgccctcaccctctcaggggtacagccagaggatgaggcagaatattactgtgctctatggtacagcaaccgctgggtgttcggtggaggaaccaaactgactgtccta

SEQ ID NO: 331 - protein, 500 aa, Artificial
  unknown organism
QVQLVQSGAEVKRPGASMKVSCKASGYTFTNYYIHWVRQAPGQGLEWMGWINPNSGATNYAQKFQGRVTMTRDTSTSTVYMELSSLRSEDTAVYYCAKSWVSWFASWGQGTLVTVSSGGGGSGGGGSGGGGSELVMTQSPDSLAVSLGERATINCKSSQSVLNSSNNRNYLAWYQQKPGQPPKLLIYWASTRESGVPDRFSGSGSGTDFTLTISGLQAEDVAVYYCQQHYSTPFTFGPGTKVDIKSGGGGSEVQLVESGGGLVQPGGSLKLSCAASGFTFNSYAMNWVRQAPGKGLEWVARIRSKYNNYATYYADSVKGRFTISRDDSKNTAYLQMNNLKTEDTAVYYCVRHGNFGNSYVSWWAYWGQGTLVTVSSGGGGSGGGGSGGGGSQTVVTQEPSLTVSPGGTVTLTCGSSTGAVTSGNYPNWVQQKPGQAPRGLIGGTKFLAPGTPARFSGSLLGGKAALTLSGVQPEDEAEYYCVLWYSNRWVFGGGTKLTVL

SEQ ID NO: 332 - DNA, 1500 bp, Artificial
  unknown organism
caggtgcagctggtccagtctggggctgaggtgaagaggcctggggcctcaatgaaggtctcctgcaaggcttctgggtacaccttcaccaactactatatacactgggtgcgacaggcccctggacaaggtcttgagtggatgggttggatcaaccctaacagtggtgccacaaactatgcacagaagttccagggcagagtcaccatgaccagggacacgtccacgagcacagtctacatggagctgagcagcctgagatctgaggacacggccgtgtattactgtgcgaaatcctgggtctcctggtttgcttcctggggtcaaggaaccttggtcaccgtctcctcaggtggtggtggttctggcggcggcggctccggtggtggtggttctgagctcgtgatgacccagtctccagactccctggctgtgtctctgggcgagagggccaccatcaactgcaagtccagccagagtgttttaaacagctccaacaataggaactacttagcttggtaccagcagaaaccaggacagcctcctaagctgctcatttactgggcatctacccgggaatccggggtccctgaccgattcagtggcagcgggtctgggacagatttcactctcaccatcagtggcctgcaggctgaagatgtggcagtttattactgtcagcaacattatagtactccattcacttttggccctgggaccaaagtggatatcaaatccggaggtggtggatccgaggtgcagctggtcgagtctggaggaggattggtgcagcctggagggtcattgaaactctcatgtgcagcctctggattcaccttcaatagctacgccatgaactgggtccgccaggctccaggaaagggtttggaatgggttgctcgcataagaagtaaatataataattatgcaacatattatgccgattcagtgaaaggcaggttcaccatctccagagatgattcaaaaaacactgcctatctacaaatgaacaacttgaaaactgaggacactgccgtgtactactgtgtgagacatgggaacttcggtaatagctacgtttcctggtgggcttactggggccaagggactctggtcaccgtctcctcaggtggtggtggttctggcggcggcggctccggtggtggtggttctcagactgttgtgactcaggaaccttcactcaccgtatcacctggtggaacagtcacactcacttgtggctcctcgactggggctgttacatctggcaactacccaaactgggtccaacaaaaaccaggtcaggcaccccgtggtctaataggtgggactaagttcctcgcccccggtactcctgccagattctcaggctccctgcttggaggcaaggctgccctcaccctctcaggggtacagccagaggatgaggcagaatattactgtgttctatggtacagcaaccgctgggtgttcggtggaggaaccaaactgactgtccta

SEQ ID NO: 333 - protein, 500 aa, Artificial
  unknown organism
QVQLVQSGAEVKRPGASMKVSCKASGYTFTNYYIHWVRQAPGQGLEWMGWINPNSGATNYAQKFQGRVTMTRDTSTSTVYMELSSLRSEDTAVYYCAKSWVSWFASWGQGTLVTVSSGGGGSGGGGSGGGGSELVMTQSPDSLAVSLGERATINCKSSQSVLNSSNNRNYLAWYQQKPGQPPKLLIYWASTRESGVPDRFSGSGSGTDFTLTISGLQAEDVAVYYCQQHYSTPFTFGPGTKVDIKSGGGGSEVQLVESGGGLVQPGGSLKLSCAASGFTFNKYAMNWVRQAPGKGLEWVARIRSKYNNYATYYADSVKDRFTISRDDSKNTAYLQMNNLKTEDTAVYYCVRHGNFGNSYISYWAYWGQGTLVTVSSGGGGSGGGGSGGGGSQTVVTQEPSLTVSPGGTVTLTCGSSTGAVTSGNYPNWVQQKPGQAPRGLIGGTKFLAPGTPARFSGSLLGGKAALTLSGVQPEDEAEYYCVLWYSNRWVFGGGTKLTVL

SEQ ID NO: 334 - DNA, 1500 bp, Artificial
  unknown organism
caggtgcagctggtccagtctggggctgaggtgaagaggcctggggcctcaatgaaggtctcctgcaaggcttctgggtacaccttcaccaactactatatacactgggtgcgacaggcccctggacaaggtcttgagtggatgggttggatcaaccctaacagtggtgccacaaactatgcacagaagttccagggcagagtcaccatgaccagggacacgtccacgagcacagtctacatggagctgagcagcctgagatctgaggacacggccgtgtattactgtgcgaaatcctgggtctcctggtttgcttcctggggtcaaggaaccttggtcaccgtctcctcaggtggtggtggttctggcggcggcggctccggtggtggtggttctgagctcgtgatgacccagtctccagactccctggctgtgtctctgggcgagagggccaccatcaactgcaagtccagccagagtgttttaaacagctccaacaataggaactacttagcttggtaccagcagaaaccaggacagcctcctaagctgctcatttactgggcatctacccgggaatccggggtccctgaccgattcagtggcagcgggtctgggacagatttcactctcaccatcagtggcctgcaggctgaagatgtggcagtttattactgtcagcaacattatagtactccattcacttttggccctgggaccaaagtggatatcaaatccggaggtggtggatccgaggtgcagctggtcgagtctggaggaggattggtgcagcctggagggtcattgaaactctcatgtgcagcctctggattcaccttcaataagtacgccatgaactgggtccgccaggctccaggaaagggtttggaatgggttgctcgcataagaagtaaatataataattatgcaacatattatgccgattcagtgaaagacaggttcaccatctccagagatgattcaaaaaacactgcctatctacaaatgaacaacttgaaaactgaggacactgccgtgtactactgtgtgagacatgggaacttcggtaatagctacatatcctactgggcttactggggccaagggactctggtcaccgtctcctcaggtggtggtggttctggcggcggcggctccggtggtggtggttctcagactgttgtgactcaggaaccttcactcaccgtatcacctggtggaacagtcacactcacttgtggctcctcgactggggctgttacatctggcaactacccaaactgggtccaacaaaaaccaggtcaggcaccccgtggtctaataggtgggactaagttcctcgcccccggtactcctgccagattctcaggctccctgcttggaggcaaggctgccctcaccctctcaggggtacagccagaggatgaggcagaatattactgtgttctatggtacagcaaccgctgggtgttcggtggaggaaccaaactgactgtccta

SEQ ID NO: 335 - protein, 500 aa, Artificial
  unknown organism
QVQLVQSGAEVKKPGASVKVSCKASGYTFTGYYMHWVRQAPGQGLEWMGWINPNSGGTSYAQKFQGRVTMTRDTSTSTVYMELSNLRSDDTAVYYCAKSWVSWFASWGQGTLVTVSSGGGGSGGGGSGGGGSDIVMTQSPDSLAVSLGERATINCKSSQSVLNSSNNRNYLAWYQQKPGQPPKLLIYWASTRESGVPDRFSGSGSGTDFTLTISGLQAEDVAVYYCQQHYSTPFTFGPGTKVDIKSGGGGSEVQLVESGGGLVQPGGSLKLSCAASGFTFNKYAMNWVRQAPGKGLEWVARIRSKYNNYATYYADSVKDRFTISRDDSKNTAYLQMNNLKTEDTAVYYCVRHGNFGNSYISYWAYWGQGTLVTVSSGGGGSGGGGSGGGGSQTVVTQEPSLTVSPGGTVTLTCGSSTGAVTSGYYPNWVQQKPGQAPRGLIGGTKFLAPGTPARFSGSLLGGKAALTLSGVQPEDEAEYYCALWYSNRWVFGGGTKLTVL

SEQ ID NO: 336 - DNA, 1500 bp, Artificial
  unknown organism
caggtgcagctggtccagtctggggctgaggtgaagaagcctggggcctcagtgaaggtctcctgcaaggcttctggatacaccttcaccggctactatatgcactgggtgcgacaggcccctggacaagggcttgagtggatgggatggatcaaccctaacagtggtggcacaagctacgcacagaagttccagggcagagtcaccatgactagggacacgtccacgagcacagtctacatggagctgagcaacctgagatctgacgacacggccgtgtattactgtgcgaaatcctgggtctcctggtttgcttcctggggtcaaggaaccttggtcaccgtctcctcaggtggtggtggttctggcggcggcggctccggtggtggtggttctgatatcgtgatgacccagtctccagactccctggctgtgtctctgggcgagagggccaccatcaactgcaagtccagccagagtgttttaaacagctccaacaataggaactacttagcttggtaccagcagaaaccaggacagcctcctaagctgctcatttactgggcatctacccgggaatccggggtccctgaccgattcagtggcagcgggtctgggacagatttcactctcaccatcagtggcctgcaggctgaagatgtggcagtttattactgtcagcaacattatagtactccattcacttttggccctgggaccaaagtggatatcaaatccggaggtggtggatccgaggtgcagctggtcgagtctggaggaggattggtgcagcctggagggtcattgaaactctcatgtgcagcctctggattcaccttcaataagtacgccatgaactgggtccgccaggctccaggaaagggtttggaatgggttgctcgcataagaagtaaatataataattatgcaacatattatgccgattcagtgaaagacaggttcaccatctccagagatgattcaaaaaacactgcctatctacaaatgaacaacttgaaaactgaggacactgccgtgtactactgtgtgagacatgggaacttcggtaatagctacatatcctactgggcttactggggccaagggactctggtcaccgtctcctcaggtggtggtggttctggcggcggcggctccggtggtggtggttctcagactgttgtgactcaggaaccttcactcaccgtatcacctggtggaacagtcacactcacttgtggctcctcgactggggctgttacatctggctactacccaaactgggtccaacaaaaaccaggtcaggcaccccgtggtctaataggtgggactaagttcctcgcccccggtactcctgccagattctcaggctccctgcttggaggcaaggctgccctcaccctctcaggggtacagccagaggatgaggcagaatattactgtgctctatggtacagcaaccgctgggtgttcggtggaggaaccaaactgactgtccta

SEQ ID NO: 337 - protein, 500 aa, Artificial
  unknown organism
QVQLVQSGAEVKKPGASVKVSCKASGYTFTGYYMHWVRQAPGQGLEWMGWINPNSGGTSYAQKFQGRVTMTRDTSTSTVYMELSNLRSDDTAVYYCAKSWVSWFASWGQGTLVTVSSGGGGSGGGGSGGGGSDIVMTQSPDSLAVSLGERATINCKSSQSVLNSSNNRNYLAWYQQKPGQPPKLLIYWASTRESGVPDRFSGSGSGTDFTLTISGLQAEDVAVYYCQQHYSTPFTFGPGTKVDIKSGGGGSEVQLVESGGGLVQPGGSLKLSCAASGFTFNSYAMNWVRQAPGKGLEWVARIRSKYNNYATYYADSVKGRFTISRDDSKNTAYLQMNNLKTEDTAVYYCVRHGNFGNSYVSWWAYWGQGTLVTVSSGGGGSGGGGSGGGGSQTVVTQEPSLTVSPGGTVTLTCGSSTGAVTSGNYPNWVQQKPGQAPRGLIGGTKFLAPGTPARFSGSLLGGKAALTLSGVQPEDEAEYYCVLWYSNRWVFGGGTKLTVL

SEQ ID NO: 338 - DNA, 1500 bp, Artificial
  unknown organism
caggtgcagctggtccagtctggggctgaggtgaagaagcctggggcctcagtgaaggtctcctgcaaggcttctggatacaccttcaccggctactatatgcactgggtgcgacaggcccctggacaagggcttgagtggatgggatggatcaaccctaacagtggtggcacaagctacgcacagaagttccagggcagagtcaccatgactagggacacgtccacgagcacagtctacatggagctgagcaacctgagatctgacgacacggccgtgtattactgtgcgaaatcctgggtctcctggtttgcttcctggggtcaaggaaccttggtcaccgtctcctcaggtggtggtggttctggcggcggcggctccggtggtggtggttctgatatcgtgatgacccagtctccagactccctggctgtgtctctgggcgagagggccaccatcaactgcaagtccagccagagtgttttaaacagctccaacaataggaactacttagcttggtaccagcagaaaccaggacagcctcctaagctgctcatttactgggcatctacccgggaatccggggtccctgaccgattcagtggcagcgggtctgggacagatttcactctcaccatcagtggcctgcaggctgaagatgtggcagtttattactgtcagcaacattatagtactccattcacttttggccctgggaccaaagtggatatcaaatccggaggtggtggatccgaggtgcagctggtcgagtctggaggaggattggtgcagcctggagggtcattgaaactctcatgtgcagcctctggattcaccttcaatagctacgccatgaactgggtccgccaggctccaggaaagggtttggaatgggttgctcgcataagaagtaaatataataattatgcaacatattatgccgattcagtgaaaggcaggttcaccatctccagagatgattcaaaaaacactgcctatctacaaatgaacaacttgaaaactgaggacactgccgtgtactactgtgtgagacatgggaacttcggtaatagctacgtttcctggtgggcttactggggccaagggactctggtcaccgtctcctcaggtggtggtggttctggcggcggcggctccggtggtggtggttctcagactgttgtgactcaggaaccttcactcaccgtatcacctggtggaacagtcacactcacttgtggctcctcgactggggctgttacatctggcaactacccaaactgggtccaacaaaaaccaggtcaggcaccccgtggtctaataggtgggactaagttcctcgcccccggtactcctgccagattctcaggctccctgcttggaggcaaggctgccctcaccctctcaggggtacagccagaggatgaggcagaatattactgtgttctatggtacagcaaccgctgggtgttcggtggaggaaccaaactgactgtccta

SEQ ID NO: 339 - protein, 500 aa, Artificial
  unknown organism
QVQLVQSGAEVKKPGASVKVSCKASGYTFTGYYMHWVRQAPGQGLEWMGWINPNSGGTSYAQKFQGRVTMTRDTSTSTVYMELSNLRSDDTAVYYCAKSWVSWFASWGQGTLVTVSSGGGGSGGGGSGGGGSDIVMTQSPDSLAVSLGERATINCKSSQSVLNSSNNRNYLAWYQQKPGQPPKLLIYWASTRESGVPDRFSGSGSGTDFTLTISGLQAEDVAVYYCQQHYSTPFTFGPGTKVDIKSGGGGSEVQLVESGGGLVQPGGSLKLSCAASGFTFNKYAMNWVRQAPGKGLEWVARIRSKYNNYATYYADSVKDRFTISRDDSKNTAYLQMNNLKTEDTAVYYCVRHGNFGNSYISYWAYWGQGTLVTVSSGGGGSGGGGSGGGGSQTVVTQEPSLTVSPGGTVTLTCGSSTGAVTSGNYPNWVQQKPGQAPRGLIGGTKFLAPGTPARFSGSLLGGKAALTLSGVQPEDEAEYYCVLWYSNRWVFGGGTKLTVL

SEQ ID NO: 340 - DNA, 1500 bp, Artificial
  unknown organism
caggtgcagctggtccagtctggggctgaggtgaagaagcctggggcctcagtgaaggtctcctgcaaggcttctggatacaccttcaccggctactatatgcactgggtgcgacaggcccctggacaagggcttgagtggatgggatggatcaaccctaacagtggtggcacaagctacgcacagaagttccagggcagagtcaccatgactagggacacgtccacgagcacagtctacatggagctgagcaacctgagatctgacgacacggccgtgtattactgtgcgaaatcctgggtctcctggtttgcttcctggggtcaaggaaccttggtcaccgtctcctcaggtggtggtggttctggcggcggcggctccggtggtggtggttctgatatcgtgatgacccagtctccagactccctggctgtgtctctgggcgagagggccaccatcaactgcaagtccagccagagtgttttaaacagctccaacaataggaactacttagcttggtaccagcagaaaccaggacagcctcctaagctgctcatttactgggcatctacccgggaatccggggtccctgaccgattcagtggcagcgggtctgggacagatttcactctcaccatcagtggcctgcaggctgaagatgtggcagtttattactgtcagcaacattatagtactccattcacttttggccctgggaccaaagtggatatcaaatccggaggtggtggatccgaggtgcagctggtcgagtctggaggaggattggtgcagcctggagggtcattgaaactctcatgtgcagcctctggattcaccttcaataagtacgccatgaactgggtccgccaggctccaggaaagggtttggaatgggttgctcgcataagaagtaaatataataattatgcaacatattatgccgattcagtgaaagacaggttcaccatctccagagatgattcaaaaaacactgcctatctacaaatgaacaacttgaaaactgaggacactgccgtgtactactgtgtgagacatgggaacttcggtaatagctacatatcctactgggcttactggggccaagggactctggtcaccgtctcctcaggtggtggtggttctggcggcggcggctccggtggtggtggttctcagactgttgtgactcaggaaccttcactcaccgtatcacctggtggaacagtcacactcacttgtggctcctcgactggggctgttacatctggcaactacccaaactgggtccaacaaaaaccaggtcaggcaccccgtggtctaataggtgggactaagttcctcgcccccggtactcctgccagattctcaggctccctgcttggaggcaaggctgccctcaccctctcaggggtacagccagaggatgaggcagaatattactgtgttctatggtacagcaaccgctgggtgttcggtggaggaaccaaactgactgtccta

SEQ ID NO: 341 - protein, 500 aa, Artificial
  unknown organism
QVQLVQSGAEVKKPGASVKVSCKASGYTFTGYYMHWVRQAPGQGLEWMGWINPNSGGTSYAQKFQGRVTMTRDTSTSTVYMELSNLRSDDTAVYYCAKSWVSWFASWGQGTLVTVSSGGGGSGGGGSGGGGSELVMTQSPDSLAVSLGERATINCKSSQSVLNSSNNRNYLAWYQQKPGQPPKLLIYWASTRESGVPDRFSGSGSGTDFTLTISGLQAEDVAVYYCQQHYSTPFTFGPGTKVDIKSGGGGSEVQLLESGGGLVQPGGSLKLSCAASGFTFNKYAMNWVRQAPGKGLEWVARIRSKYNNYATYYADSVKDRFTISRDDSKNTAYLQMNNLKTEDTAVYYCVRHGNFGNSYISYWAYWGQGTLVTVSSGGGGSGGGGSGGGGSELVVTQEPSLTVSPGGTVTLTCGSSTGAVTSGYYPNWVQQKPGQAPRGLIGGTKFLAPGTPARFSGSLLGGKAALTLSGVQPEDEAEYYCALWYSNRWVFGGGTKLTVL

SEQ ID NO: 342 - DNA, 1500 bp, Artificial
  unknown organism
caggtgcagctggtccagtctggggctgaggtgaagaagcctggggcctcagtgaaggtctcctgcaaggcttctggatacaccttcaccggctactatatgcactgggtgcgacaggcccctggacaagggcttgagtggatgggatggatcaaccctaacagtggtggcacaagctacgcacagaagttccagggcagagtcaccatgactagggacacgtccacgagcacagtctacatggagctgagcaacctgagatctgacgacacggccgtgtattactgtgcgaaatcctgggtctcctggtttgcttcctggggtcaaggaaccttggtcaccgtctcctcaggtggtggtggttctggcggcggcggctccggtggtggtggttctgagctcgtgatgacccagtctccagactccctggctgtgtctctgggcgagagggccaccatcaactgcaagtccagccagagtgttttaaacagctccaacaataggaactacttagcttggtaccagcagaaaccaggacagcctcctaagctgctcatttactgggcatctacccgggaatccggggtccctgaccgattcagtggcagcgggtctgggacagatttcactctcaccatcagtggcctgcaggctgaagatgtggcagtttattactgtcagcaacattatagtactccattcacttttggccctgggaccaaagtggatatcaaatccggaggtggtggatccgaggtgcagctgctcgagtctggaggaggattggtgcagcctggagggtcattgaaactctcatgtgcagcctctggattcaccttcaataagtacgccatgaactgggtccgccaggctccaggaaagggtttggaatgggttgctcgcataagaagtaaatataataattatgcaacatattatgccgattcagtgaaagacaggttcaccatctccagagatgattcaaaaaacactgcctatctacaaatgaacaacttgaaaactgaggacactgccgtgtactactgtgtgagacatgggaacttcggtaatagctacatatcctactgggcttactggggccaagggactctggtcaccgtctcctcaggtggtggtggttctggcggcggcggctccggtggtggtggttctgagctcgttgtgactcaggaaccttcactcaccgtatcacctggtggaacagtcacactcacttgtggctcctcgactggggctgttacatctggctactacccaaactgggtccaacaaaaaccaggtcaggcaccccgtggtctaataggtgggactaagttcctcgcccccggtactcctgccagattctcaggctccctgcttggaggcaaggctgccctcaccctctcaggggtacagccagaggatgaggcagaatattactgtgctctatggtacagcaaccgctgggtgttcggtggaggaaccaaactgactgtccta

SEQ ID NO: 343 - protein, 499 aa, Artificial
  unknown organism
QVQLQESGPGLVKPSETLSLTCVVSGGSISSSNWWSWVRQPPGKGLEWLGTIYYNGNTYYNPSLKSRVTISVDTSKNQFSLRLSSVTAADTAVYYCAKSWVSWFASWGQGTLVTVSSGGGGSGGGGSGGGGSDIVMTQSPDSLAVSLGERATINCKSSQSVLSSSNNKNYLNWYQQKPGQPPKLLIYWASTRESGVPDRFSGSGSGTDFTLTISSLQAEDVAVYYCQQHYSVPFTFGPGTKVDIKGGGGSEVQLVESGGGLVQPGGSLKLSCAASGFTFNKYAMNWVRQAPGKGLEWVARIRSKYNNYATYYADSVKDRFTISRDDSKNTAYLQMNNLKTEDTAVYYCVRHGNFGNSYISYWAYWGQGTLVTVSSGGGGSGGGGSGGGGSQTVVTQEPSLTVSPGGTVTLTCGSSTGAVTSGYYPNWVQQKPGQAPRGLIGGTKFLAPGTPARFSGSLLGGKAALTLSGVQPEDEAEYYCALWYSNRWVFGGGTKLTVL

SEQ ID NO: 344 - DNA, 1497 bp, Artificial
  unknown organism
caggtgcagctgcaagagtctggcccaggactggtgaagccttcggagaccctgtccctcacctgcgttgtctctggtggctccatcagcagtagtaactggtggagctgggtccgccagcccccagggaagggactggagtggcttgggactatctattataatgggaatacctactacaacccgtccctcaagagtcgagtcaccatctccgtagacacgtccaagaaccagttctccctgaggctgagctctgtgaccgccgcagacacggccgtgtattactgtgcgaaatcctgggtctcctggtttgcttcctggggtcaaggaaccttggtcaccgtctcctcaggtggtggtggttctggcggcggcggctccggtggtggtggttctgatatcgtgatgacacagtctccagactccctggctgtgtctctgggcgagagggccaccatcaactgcaagtccagccagagtgtcttatccagctccaacaataagaactacttaaattggtaccagcagaaaccaggacagcctcctaagttgctcatttactgggcatctacccgggaatccggggtccctgaccgattcagtggcagcgggtctgggacagatttcactctcaccatcagcagcctgcaggctgaagatgtggcagtttattactgtcagcaacattatagtgttccattcactttcggccctgggaccaaagtggatatcaaaggaggtggtggctccgaggtgcagctggtcgagtctggaggaggattggtgcagcctggagggtcattgaaactctcatgtgcagcctctggattcaccttcaataagtacgccatgaactgggtccgccaggctccaggaaagggtttggaatgggttgctcgcataagaagtaaatataataattatgcaacatattatgccgattcagtgaaagacaggttcaccatctccagagatgattcaaaaaacactgcctatctacaaatgaacaacttgaaaactgaggacactgccgtgtactactgtgtgagacatgggaacttcggtaatagctacatatcctactgggcttactggggccaagggactctggtcaccgtctcctcaggtggtggtggttctggcggcggcggctccggtggtggtggttctcagactgttgtgactcaggaaccttcactcaccgtatcacctggtggaacagtcacactcacttgtggctcctcgactggggctgttacatctggctactacccaaactgggtccaacaaaaaccaggtcaggcaccccgtggtctaataggtgggactaagttcctcgcccccggtactcctgccagattctcaggctccctgcttggaggcaaggctgccctcaccctctcaggggtacagccagaggatgaggcagaatattactgtgctctatggtacagcaaccgctgggtgttcggtggaggaaccaaactgactgtccta

SEQ ID NO: 345 - protein, 500 aa, Artificial
  unknown organism
EVQLQESGPGLVKPSETLSLTCVVSGGSISSSNWWSWVRQPPGKGLEWLGTIYYNGNTYYNPSLKSRVTISVDTSKNQFSLRLSSVTAADTAVYYCAKSWVSWFASWGQGTLVTVSSGGGGSGGGGSGGGGSELVMTQSPDSLAVSLGERATINCKSSQSVLSSSNNKNYLNWYQQKPGQPPKLLIYWASTRESGVPDRFSGSGSGTDFTLTISSLQAEDVAVYYCQQHYSVPFTFGPGTKVDIKSGGGGSEVQLLESGGGLVQPGGSLKLSCAASGFTFNKYAMNWVRQAPGKGLEWVARIRSKYNNYATYYADSVKDRFTISRDDSKNTAYLQMNNLKTEDTAVYYCVRHGNFGNSYISYWAYWGQGTLVTVSSGGGGSGGGGSGGGGSELVVTQEPSLTVSPGGTVTLTCGSSTGAVTSGYYPNWVQQKPGQAPRGLIGGTKFLAPGTPARFSGSLLGGKAALTLSGVQPEDEAEYYCALWYSNRWVFGGGTKLTVL

SEQ ID NO: 346 - DNA, 1500 bp, Artificial
  unknown organism
gaggtgcagctgcaagagtctggcccaggactggtgaagccttcggagaccctgtccctcacctgcgttgtctctggtggctccatcagcagtagtaactggtggagctgggtccgccagcccccagggaagggactggagtggcttgggactatctattataatgggaatacctactacaacccgtccctcaagagtcgagtcaccatctccgtagacacgtccaagaaccagttctccctgaggctgagctctgtgaccgccgcagacacggccgtgtattactgtgcgaaatcctgggtctcctggtttgcttcctggggtcaaggaaccttggtcaccgtctcctcaggtggtggtggttctggcggcggcggctccggtggtggtggttctgagctcgtgatgacacagtctccagactccctggctgtgtctctgggcgagagggccaccatcaactgcaagtccagccagagtgtcttatccagctccaacaataagaactacttaaattggtaccagcagaaaccaggacagcctcctaagttgctcatttactgggcatctacccgggaatccggggtccctgaccgattcagtggcagcgggtctgggacagatttcactctcaccatcagcagcctgcaggctgaagatgtggcagtttattactgtcagcaacattatagtgttccattcactttcggccctgggaccaaagtggatatcaaatccggaggtggtggatccgaggtgcagctgctcgagtctggaggaggattggtgcagcctggagggtcattgaaactctcatgtgcagcctctggattcaccttcaataagtacgccatgaactgggtccgccaggctccaggaaagggtttggaatgggttgctcgcataagaagtaaatataataattatgcaacatattatgccgattcagtgaaagacaggttcaccatctccagagatgattcaaaaaacactgcctatctacaaatgaacaacttgaaaactgaggacactgccgtgtactactgtgtgagacatgggaacttcggtaatagctacatatcctactgggcttactggggccaagggactctggtcaccgtctcctcaggtggtggtggttctggcggcggcggctccggtggtggtggttctgagctcgttgtgactcaggaaccttcactcaccgtatcacctggtggaacagtcacactcacttgtggctcctcgactggggctgttacatctggctactacccaaactgggtccaacaaaaaccaggtcaggcaccccgtggtctaataggtgggactaagttcctcgcccccggtactcctgccagattctcaggctccctgcttggaggcaaggctgccctcaccctctcaggggtacagccagaggatgaggcagaatattactgtgctctatggtacagcaaccgctgggtgttcggtggaggaaccaaactgactgtccta

SEQ ID NO: 347 - protein, 500 aa, Artificial
  unknown organism
EVQLQESGPGLVKPSETLSLTCVVSGGSISSSNWWSWVRQPPGKGLEWLGTIYYNGNTYYNPSLKSRVTISVDTSKNQFSLRLSSVTAADTAVYYCAKSWVSWFASWGQGTLVTVSSGGGGSGGGGSGGGGSELVMTQSPDSLAVSLGERATINCKSSQSVLSSSNNKNYLNWYQQKPGQPPKLLIYWASTRESGVPDRFSGSGSGTDFTLTISSLQAEDVAVYYCQQHYSVPFTFGPGTKVDIKSGGGGSEVQLLESGGGLVQPGGSLKLSCAASGFTFNRYAMNWVRQAPGKGLEWVARIRSKYNNYATYYADSVKGRFTISRDDSKNTAYLQMNNLKTEDTAVYYCVRHGNFGNSYLSYFAYWGQGTLVTVSSGGGGSGGGGSGGGGSELVVTQEPSLTVSPGGTVTLTCGSSTGAVTSGYYPNWVQQKPGQAPRGLIGGTKFLAPGTPARFSGSLLGGKAALTLSGVQPEDEAEYYCALWYSNRWVFGGGTKLTVL

SEQ ID NO: 348 - DNA, 1500 bp, Artificial
  unknown organism
gaggtgcagctgcaagagtctggcccaggactggtgaagccttcggagaccctgtccctcacctgcgttgtctctggtggctccatcagcagtagtaactggtggagctgggtccgccagcccccagggaagggactggagtggcttgggactatctattataatgggaatacctactacaacccgtccctcaagagtcgagtcaccatctccgtagacacgtccaagaaccagttctccctgaggctgagctctgtgaccgccgcagacacggccgtgtattactgtgcgaaatcctgggtctcctggtttgcttcctggggtcaaggaaccttggtcaccgtctcctcaggtggtggtggttctggcggcggcggctccggtggtggtggttctgagctcgtgatgacacagtctccagactccctggctgtgtctctgggcgagagggccaccatcaactgcaagtccagccagagtgtcttatccagctccaacaataagaactacttaaattggtaccagcagaaaccaggacagcctcctaagttgctcatttactgggcatctacccgggaatccggggtccctgaccgattcagtggcagcgggtctgggacagatttcactctcaccatcagcagcctgcaggctgaagatgtggcagtttattactgtcagcaacattatagtgttccattcactttcggccctgggaccaaagtggatatcaaatccggaggtggtggatccgaggtgcagctgctcgagtctggaggaggattggtgcagcctggagggtcattgaaactctcatgtgcagcctctggattcaccttcaatcgctacgccatgaactgggtccgccaggctccaggaaagggtttggaatgggttgctcgcataagaagtaaatataataattatgcaacatattatgccgattcagtgaaagggaggttcaccatctccagagatgattcaaaaaacactgcctatctacaaatgaacaacttgaaaactgaggacactgccgtgtactactgtgtgagacatgggaacttcggtaatagctacttatcctacttcgcttactggggccaagggactctggtcaccgtctcctcaggtggtggtggttctggcggcggcggctccggtggtggtggttctgagctcgttgtgactcaggaaccttcactcaccgtatcacctggtggaacagtcacactcacttgtggctcctcgactggggctgttacatctggctactacccaaactgggtccaacaaaaaccaggtcaggcaccccgtggtctaataggtgggactaagttcctcgcccccggtactcctgccagattctcaggctccctgcttggaggcaaggctgccctcaccctctcaggggtacagccagaggatgaggcagaatattactgtgctctatggtacagcaaccgctgggtgttcggtggaggaaccaaactgactgtccta

SEQ ID NO: 349 - protein, 267 aa, Artificial
  unknown organism
QDGNEEMGGITQTPYKVSISGTTVILTSGEPKSCDKTHTCPPCPAPELLGGPSVFLFPPKPKDTLMISRTPEVTCVVVDVSHEDPEVKFNWYVDGVEVHNAKTKPREEQYNSTYRVVSVLTVLHQDWLNGKEYKCKVSNKALPAPIEKTISKAKGQPREPQVYTLPPSREEMTKNQVSLTCLVKGFYPSDIAVEWESNGQPENNYKTTPPVLDSDGSFFLYSKLTVDKSRWQQGNVFSCSVMHEALHNHYTQKSLSLSPGKHHHHHH

SEQ ID NO: 350 - DNA, 858 bp, Artificial
  unknown organism
atgggatggagctgtatcatcctcttcttggtagcaacagctacaggtgtacactcccaagatggtaatgaagaaatgggtggtattacacagacaccatataaagtctccatctctggaaccacagtaatattgacatccggagagcccaaatcttgtgacaaaactcacacatgcccaccgtgcccagcacctgaactcctggggggaccgtcagtcttcctcttccccccaaaacccaaggacaccctcatgatctcccggacccctgaggtcacatgcgtggtggtggacgtgagccacgaagaccctgaggtcaagttcaactggtacgtggacggcgtggaggtgcataatgccaagacaaagccgcgggaggagcagtacaacagcacgtaccgtgtggtcagcgtcctcaccgtcctgcaccaggactggctgaatggcaaggagtacaagtgcaaggtctccaacaaagccctcccagcccccatcgagaaaaccatctccaaagccaaagggcagccccgagaaccacaggtgtacaccctgcccccatcccgggaggagatgaccaagaaccaggtcagcctgacctgcctggtcaaaggcttctatcccagcgacatcgccgtggagtgggagagcaatgggcagccggagaacaactacaagaccacgcctcccgtgctggactccgacggctccttcttcctctatagcaagctcaccgtggacaagagcaggtggcagcaggggaacgtcttctcatgctccgtgatgcatgaggctctgcacaaccactacacgcagaagagcctctccctgtccccgggtaaacatcatcaccatcatcat

SEQ ID NO: 351 - protein, 333 aa, Artificial
  unknown organism
QDGNEEMGGITQTPYKVSISGTTVILTDYKDDDDKTASFAAAQKECVCENYKLAVNCFLNDNGQCQCTSIGAQNTVLCSKLAAKCLVMKAEMNGSKLGRRAKPEGALQNNDGLYDPDCDESGLFKAKQCNGTSTCWCVNTAGVRRTDKDTEITCSERVRTYWIIIELKHKAREKPYDVQSLRTALEEAIKTRYQLDPKFITNILYEDNVITIDLVQNSSQKTQNDVDIADVAYYFEKDVKGESLFHSKKMDLRVNGEQLDLDPGQTLIYYVDEKAPEFSMQGLKAGVIAVIVVVVIAIVAGIVVLVISRKKRMAKYEKAEIKEMGEMHRELNA

SEQ ID NO: 352 - DNA, 1056 bp, Artificial
  unknown organism
atgggatggagctgtatcatcctcttcttggtagcaacagctacaggtgtacactcccaagatggtaatgaagaaatgggtggtattacacagacaccatataaagtctccatctctggaaccacagtaatattgacagattacaaggacgacgatgacaagactgcgagttttgccgcagctcagaaagaatgtgtctgtgaaaactacaagctggccgtaaactgctttttgaatgacaatggtcaatgccagtgtacttcgattggtgcacaaaatactgtcctttgctcaaagctggctgccaaatgtttggtgatgaaggcagaaatgaacggctcaaaacttgggagaagagcgaaacctgaaggggctctccagaacaatgatggcctttacgatcctgactgcgatgagagcgggctctttaaggccaagcagtgcaacggcacctccacgtgctggtgtgtgaacactgctggggtcagaagaactgacaaggacactgaaataacctgctctgagcgagtgagaacctactggatcatcattgaattaaaacacaaagcaagagaaaaaccttatgatgttcaaagtttgcggactgcacttgaggaggcgatcaaaacgcgttatcaactggatccaaaatttatcacaaatattttgtatgaggataatgttatcactattgatctggttcaaaattcttctcagaaaactcagaatgatgtggacatagctgatgtggcttattattttgaaaaagatgttaaaggtgaatccttgtttcattctaagaaaatggacctgagagtaaatggggaacaactggatctggatcctggtcaaactttaatttattatgtcgatgaaaaagcacctgaattctcaatgcagggtctaaaagctggtgttattgctgttattgtggttgtggtgatagcaattgttgctggaattgttgtgctggttatttccagaaagaagagaatggcaaagtatgagaaggctgagataaaggagatgggtgagatgcatagggaactcaatgca

SEQ ID NO: 353 - protein, 333 aa, Artificial
  unknown organism
QDGNEEMGDTTQNPYKVSISGTTVTLTDYKDDDDKTASFAAAQKECVCENYKLAVNCFLNDNGQCQCTSIGAQNTVLCSKLAAKCLVMKAEMNGSKLGRRAKPEGALQNNDGLYDPDCDESGLFKAKQCNGTSTCWCVNTAGVRRTDKDTEITCSERVRTYWIIIELKHKAREKPYDVQSLRTALEEAIKTRYQLDPKFITNILYEDNVITIDLVQNSSQKTQNDVDIADVAYYFEKDVKGESLFHSKKMDLRVNGEQLDLDPGQTLIYYVDEKAPEFSMQGLKAGVIAVIVVVVIAIVAGIVVLVISRKKRMAKYEKAEIKEMGEMHRELNA

SEQ ID NO: 354 - DNA, 1056 bp, Artificial
  unknown organism
atgggatggagctgtatcatcctcttcttggtagcaacagctacaggtgtacactcccaggacggtaatgaagaaatgggtgatactacacagaacccatataaagtttccatctcaggaaccacagtaacactgacagattacaaggacgacgatgacaagactgcgagttttgccgcagctcagaaagaatgtgtctgtgaaaactacaagctggccgtaaactgctttttgaatgacaatggtcaatgccagtgtacttcgattggtgcacaaaatactgtcctttgctcaaagctggctgccaaatgtttggtgatgaaggcagaaatgaacggctcaaaacttgggagaagagcgaaacctgaaggggctctccagaacaatgatggcctttacgatcctgactgcgatgagagcgggctctttaaggccaagcagtgcaacggcacctccacgtgctggtgtgtgaacactgctggggtcagaagaactgacaaggacactgaaataacctgctctgagcgagtgagaacctactggatcatcattgaattaaaacacaaagcaagagaaaaaccttatgatgttcaaagtttgcggactgcacttgaggaggcgatcaaaacgcgttatcaactggatccaaaatttatcacaaatattttgtatgaggataatgttatcactattgatctggttcaaaattcttctcagaaaactcagaatgatgtggacatagctgatgtggcttattattttgaaaaagatgttaaaggtgaatccttgtttcattctaagaaaatggacctgagagtaaatggggaacaactggatctggatcctggtcaaactttaatttattatgtcgatgaaaaagcacctgaattctcaatgcagggtctaaaagctggtgttattgctgttattgtggttgtggtgatagcaattgttgctggaattgttgtgctggttatttccagaaagaagagaatggcaaagtatgagaaggctgagataaaggagatgggtgagatgcatagggaactcaatgca

SEQ ID NO: 355 - protein, 333 aa, Artificial; identical to SEQ ID NO: 353
  unknown organism

SEQ ID NO: 356 - DNA, 1056 bp, Artificial; identical to SEQ ID NO: 354
  unknown organism

SEQ ID NO: 357 - DNA, 1056 bp, Artificial
  unknown organism
atgggatggagctgtatcatcctcttcttggtagcaacagctacaggtgtacactcccaggacggtaatgaagagattggtgatactacccagaacccatataaagtttccatctcaggaaccacagtaacactgacagattacaaggacgacgatgacaagactgcgagttttgccgcagctcagaaagaatgtgtctgtgaaaactacaagctggccgtaaactgctttttgaatgacaatggtcaatgccagtgtacttcgattggtgcacaaaatactgtcctttgctcaaagctggctgccaaatgtttggtgatgaaggcagaaatgaacggctcaaaacttgggagaagagcgaaacctgaaggggctctccagaacaatgatggcctttacgatcctgactgcgatgagagcgggctctttaaggccaagcagtgcaacggcacctccacgtgctggtgtgtgaacactgctggggtcagaagaactgacaaggacactgaaataacctgctctgagcgagtgagaacctactggatcatcattgaattaaaacacaaagcaagagaaaaaccttatgatgttcaaagtttgcggactgcacttgaggaggcgatcaaaacgcgttatcaactggatccaaaatttatcacaaatattttgtatgaggataatgttatcactattgatctggttcaaaattcttctcagaaaactcagaatgatgtggacatagctgatgtggcttattattttgaaaaagatgttaaaggtgaatccttgtttcattctaagaaaatggacctgagagtaaatggggaacaactggatctggatcctggtcaaactttaatttattatgtcgatgaaaaagcacctgaattctcaatgcagggtctaaaagctggtgttattgctgttattgtggttgtggtgatagcaattgttgctggaattgttgtgctggttatttccagaaagaagagaatggcaaagtatgagaaggctgagataaaggagatgggtgagatgcatagggaactcaatgca

SEQ ID NO: 358 - protein, 333 aa, Artificial
  unknown organism
QDGNEEIGDTTQNPYKVSISGTTVTLTDYKDDDDKTASFAAAQKECVCENYKLAVNCFLNDNGQCQCTSIGAQNTVLCSKLAAKCLVMKAEMNGSKLGRRAKPEGALQNNDGLYDPDCDESGLFKAKQCNGTSTCWCVNTAGVRRTDKDTEITCSERVRTYWIIIELKHKAREKPYDVQSLRTALEEAIKTRYQLDPKFITNILYEDNVITIDLVQNSSQKTQNDVDIADVAYYFEKDVKGESLFHSKKMDLRVNGEQLDLDPGQTLIYYVDEKAPEFSMQGLKAGVIAVIVVVVIAIVAGIVVLVISRKKRMAKYEKAEIKEMGEMHRELNA

SEQ ID NO: 359 - protein, 333 aa, Artificial
  unknown organism
QEDIERPDEDTQKTFKVSISGDKVELTDYKDDDDKTASFAAAQKECVCENYKLAVNCFLNDNGQCQCTSIGAQNTVLCSKLAAKCLVMKAEMNGSKLGRRAKPEGALQNNDGLYDPDCDESGLFKAKQCNGTSTCWCVNTAGVRRTDKDTEITCSERVRTYWIIIELKHKAREKPYDVQSLRTALEEAIKTRYQLDPKFITNILYEDNVITIDLVQNSSQKTQNDVDIADVAYYFEKDVKGESLFHSKKMDLRVNGEQLDLDPGQTLIYYVDEKAPEFSMQGLKAGVIAVIVVVVIAIVAGIVVLVISRKKRMAKYEKAEIKEMGEMHRELNA

SEQ ID NO: 360 - DNA, 1056 bp, Artificial
  unknown organism
atgggatggagctgtatcatcctcttcttggtagcaacagctacaggtgtacactcccaagaagacattgaaagaccagatgaagatacacagaaaacatttaaagtctccatctctggagacaaagtagagctgacagattacaaggacgacgatgacaagactgcgagttttgccgcagctcagaaagaatgtgtctgtgaaaactacaagctggccgtaaactgctttttgaatgacaatggtcaatgccagtgtacttcgattggtgcacaaaatactgtcctttgctcaaagctggctgccaaatgtttggtgatgaaggcagaaatgaacggctcaaaacttgggagaagagcgaaacctgaaggggctctccagaacaatgatggcctttacgatcctgactgcgatgagagcgggctctttaaggccaagcagtgcaacggcacctccacgtgctggtgtgtgaacactgctggggtcagaagaactgacaaggacactgaaataacctgctctgagcgagtgagaacctactggatcatcattgaattaaaacacaaagcaagagaaaaaccttatgatgttcaaagtttgcggactgcacttgaggaggcgatcaaaacgcgttatcaactggatccaaaatttatcacaaatattttgtatgaggataatgttatcactattgatctggttcaaaattcttctcagaaaactcagaatgatgtggacatagctgatgtggcttattattttgaaaaagatgttaaaggtgaatccttgtttcattctaagaaaatggacctgagagtaaatggggaacaactggatctggatcctggtcaaactttaatttattatgtcgatgaaaaagcacctgaattctcaatgcagggtctaaaagctggtgttattgctgttattgtggttgtggtgatagcaattgttgctggaattgttgtgctggttatttccagaaagaagagaatggcaaagtatgagaaggctgagataaaggagatgggtgagatgcatagggaactcaatgca

SEQ ID NO: 361 - protein, 186 aa, Artificial
  unknown organism
QDGNEEMGGITQTPYKVSISGTTVILTCPQYPGSEILWQHNDKNIGGDEDDKNIGSDEDHLSLKEFSELEQSGYYVCYPRGSKPEDANFYLYLRARVCENCMEMDVMSVATIVIVDICITGGLLLLVYYWSKNRKAKAKPVTRGAGAGGRQRGQNKERPPPVPNPDYEPIRKGQRDLYSGLNQRRI

SEQ ID NO: 362 - DNA, 621 bp, Artificial
  unknown organism
atgcagtcgggcactcactggagagttctgggcctctgcctcttatcagttggcgtttgggggcaagatggtaatgaagaaatgggtggtattacacagacaccatataaagtctccatctctggaaccacagtaatattgacatgccctcagtatcctggatctgaaatactatggcaacacaatgataaaaacataggcggtgatgaggatgataaaaacataggcagtgatgaggatcacctgtcactgaaggaattttcagaattggagcaaagtggttattatgtctgctaccccagaggaagcaaaccagaagatgcgaacttttatctctacctgagggcacgcgtgtgtgagaactgcatggagatggatgtgatgtcggtggccacaattgtcatagtggacatctgcatcactgggggcttgctgctgctggtttactactggagcaagaatagaaaggccaaggccaagcctgtgacacgaggagcgggtgctggcggcaggcaaaggggacaaaacaaggagaggccaccacctgttcccaacccagactatgagcccatccggaaaggccagcgggacctgtattctggcctgaatcagagacgcatc

SEQ ID NO: 363 - protein, 19 aa, Artificial
  unknown organism
MGWSCIILFLVATATGVHS

SEQ ID NO: 364 - DNA, 57 bp, Artificial
  unknown organism
atgggatggagctgtatcatcctcttcttggtagcaacagctacaggtgtacactcc

SEQ ID NO: 365 - protein, 324 aa, Artificial
  murine
AKTTPPSVYPLAPGSAAQTNSMVTLGCLVKGYFPEPVTVTWNSGSLSSGVHTFPAVLQSDLYTLSSSVTVPSSTWPSETVTCNVAHPASSTKVDKKIVPRDCGCKPCICTVPEVSSVFIFPPKPKDVLTITLTPKVTCVVVDISKDDPEVQFSWFVDDVEVHTAQTQPREEQFNSTFRSVSELPIMHQDWLNGKEFKCRVNSAAFPAPIEKTISKTKGRPKAPQVYTIPPPKEQMAKDKVSLTCMITDFFPEDITVEWQWNGQPAENYKNTQPIMDTDGSYFVYSKLNVQKSNWEAGNTFTCSVLHEGLHNHHTEKSLSHSPGK

SEQ ID NO: 366 - DNA, 972 bp, Artificial
  murine
gccaaaacgacacccccatctgtctatccactggcccctggatctgctgcccaaactaactccatggtgaccctgggatgcctggtcaagggctatttccctgagccagtgacagtgacctggaactctggatccctgtccagcggtgtgcacaccttcccagctgtcctgcagtctgacctctacactctgagcagctcagtgactgtcccctccagcacctggcccagcgagaccgtcacctgcaacgttgcccacccggccagcagcaccaaggtggacaagaaaattgtgcccagggattgtggttgtaagccttgcatatgtacagtcccagaagtatcatctgtcttcatcttccccccaaagcccaaggatgtgctcaccattactctgactcctaaggtcacgtgtgttgtggtagacatcagcaaggatgatcccgaggtccagttcagctggtttgtagatgatgtggaggtgcacacagctcagacgcaaccccgggaggagcagttcaacagcactttccgctcagtcagtgaacttcccatcatgcaccaggactggctcaatggcaaggagttcaaatgcagggtcaacagtgcagctttccctgcccccatcgagaaaaccatctccaaaaccaaaggcagaccgaaggctccacaggtgtacaccattccacctcccaaggagcagatggccaaggataaagtcagtctgacctgcatgataacagacttcttccctgaagacattactgtggagtggcagtggaatgggcagccagcggagaactacaagaacactcagcccatcatggacacagatggctcttacttcgtctacagcaagctcaatgtgcagaagagcaactgggaggcaggaaatactttcacctgctctgtgttacatgagggcctgcacaaccaccatactgagaagagcctctcccactctcctggtaaa

SEQ ID NO: 367 - protein, 106 aa, Artificial
  human
GQPKAAPSVTLFPPSSEELQANKATLVCLISDFYPGAVTVAWKADSSPVKAGVETTTPSKQSNNKYAASSYLSLTPEQWKSHKSYSCQVTHEGSTVEKTVAPTECS

SEQ ID NO: 368 - DNA, 318 bp, Artificial
  human
ggtcagcccaaggctgccccctcggtcactctgttcccaccctcctctgaggagcttcaagccaacaaggccacactggtgtgtctcataagtgacttctacccgggagccgtgacagtggcctggaaggcagatagcagccccgtcaaggcgggagtggagaccaccacaccctccaaacaaagcaacaacaagtacgcggccagcagctacctgagcctgacgcctgagcagtggaagtcccacaaaagctacagctgccaggtcacgcatgaagggagcaccgtggagaagacagtggcccctacagaatgttca

SEQ ID NO: 369 - protein, 1186 aa, Artificial
  human
LEEKKVCQGTSNKLTQLGTFEDHFLSLQRMFNNCEVVLGNLEITYVQRNYDLSFLKTIQEVAGYVLIALNTVERIPLENLQIIRGNMYYENSYALAVLSNYDANKTGLKELPMRNLQEILHGAVRFSNNPALCNVESIQWRDIVSSDFLSNMSMDFQNHLGSCQKCDPSCPNGSCWGAGEENCQKLTKIICAQQCSGRCRGKSPSDCCHNQCAAGCTGPRESDCLVCRKFRDEATCKDTCPPLMLYNPTTYQMDVNPEGKYSFGATCVKKCPRNYVVTDHGSCVRACGADSYEMEEDGVRKCKKCEGPCRKVCNGIGIGEFKDSLSINATNIKHFKNCTSISGDLHILPVAFRGDSFTHTPPLDPQELDILKTVKEITGFLLIQAWPENRTDLHAFENLEIIRGRTKQHGQFSLAVVSLNITSLGLRSLKEISDGDVIISGNKNLCYANTINWKKLFGTSGQKTKIISNRGENSCKATGQVCHALCSPEGCWGPEPRDCVSCRNVSRGRECVDKCNLLEGEPREFVENSECIQCHPECLPQAMNITCTGRGPDNCIQCAHYIDGPHCVKTCPAGVMGENNTLVWKYADAGHVCHLCHPNCTYGCTGPGLEGCPTNGPKIPSIATGMVGALLLLLVVALGIGLFMRRRHIVRKRTLRRLLQERELVEPLTPSGEAPNQALLRILKETEFKKIKVLGSGAFGTVYKGLWIPEGEKVKIPVAIKELREATSPKANKEILDEAYVMASVDNPHVCRLLGICLTSTVQLITQLMPFGCLLDYVREHKDNIGSQYLLNWCVQIAKGMNYLEDRRLVHRDLAARNVLVKTPQHVKITDFGLAKLLGAEEKEYHAEGGKVPIKWMALESILHRIYTHQSDVWSYGVTVWELMTFGSKPYDGIPASEISSILEKGERLPQPPICTIDVYMIMVKCWMIDADSRPKFRELIIEFSKMARDPQRYLVIQGDERMHLPSPTDSNFYRALMDEEDMDDVVDADEYLIPQQGFFSSPSTSRTPLLSSLSATSNNSTVACIDRNGLQSCPIKEDSFLQRYSSDPTGALTEDSIDDTFLPVPEYINQSVPKRPAGSVQNPVYHNQPLNPAPSRDPHYQDPHSTAVGNPEYLNTVQPTCVNSTFDSPAHWAQKGSHQISLDNPDYQQDFFPKEAKPNGIFKGSTAENAEYLRVAPQSSEFIGA

SEQ ID NO: 370 - DNA, 3630 bp, Artificial
  human
atgcgaccctccgggacggccggggcagcgctcctggcgctgctggctgcgctctgcccggcgagtcgggctctggaggaaaagaaagtttgccaaggcacgagtaacaagctcacgcagttgggcacttttgaagatcattttctcagcctccagaggatgttcaataactgtgaggtggtccttgggaatttggaaattacctatgtgcagaggaattatgatctttccttcttaaagaccatccaggaggtggctggttatgtcctcattgccctcaacacagtggagcgaattcctttggaaaacctgcagatcatcagaggaaatatgtactacgaaaattcctatgccttagcagtcttatctaactatgatgcaaataaaaccggactgaaggagctgcccatgagaaatttacaggaaatcctgcatggcgccgtgcggttcagcaacaaccctgccctgtgcaacgtggagagcatccagtggcgggacatagtcagcagtgactttctcagcaacatgtcgatggacttccagaaccacctgggcagctgccaaaagtgtgatccaagctgtcccaatgggagctgctggggtgcaggagaggagaactgccagaaactgaccaaaatcatctgtgcccagcagtgctccgggcgctgccgtggcaagtcccccagtgactgctgccacaaccagtgtgctgcaggctgcacaggcccccgggagagcgactgcctggtctgccgcaaattccgagacgaagccacgtgcaaggacacctgccccccactcatgctctacaaccccaccacgtaccagatggatgtgaaccccgagggcaaatacagctttggtgccacctgcgtgaagaagtgtccccgtaattatgtggtgacagatcacggctcgtgcgtccgagcctgtggggccgacagctatgagatggaggaagacggcgtccgcaagtgtaagaagtgcgaagggccttgccgcaaagtgtgtaacggaataggtattggtgaatttaaagactcactctccataaatgctacgaatattaaacacttcaaaaactgcacctccatcagtggcgatctccacatcctgccggtggcatttaggggtgactccttcacacatactcctcctctggatccacaggaactggatattctgaaaaccgtaaaggaaatcacagggtttttgctgattcaggcttggcctgaaaacaggacggacctccatgcctttgagaacctagaaatcatacgcggcaggaccaagcaacatggtcagttttctcttgcagtcgtcagcctgaacataacatccttgggattacgctccctcaaggagataagtgatggagatgtgataatttcaggaaacaaaaatttgtgctatgcaaatacaataaactggaaaaaactgtttgggacctccggtcagaaaaccaaaattataagcaacagaggtgaaaacagctgcaaggccacaggccaggtctgccatgccttgtgctcccccgagggctgctggggcccggagcccagggactgcgtctcttgccggaatgtcagccgaggcagggaatgcgtggacaagtgcaaccttctggagggtgagccaagggagtttgtggagaactctgagtgcatacagtgccacccagagtgcctgcctcaggccatgaacatcacctgcacaggacggggaccagacaactgtatccagtgtgcccactacattgacggcccccactgcgtcaagacctgcccggcaggagtcatgggagaaaacaacaccctggtctggaagtacgcagacgccggccatgtgtgccacctgtgccatccaaactgcacctacggatgcactgggccaggtcttgaaggctgtccaacgaatgggcctaagatcccgtccatcgccactgggatggtgggggccctcctcttgctgctggtggtggccctggggatcggcctcttcatgcgaaggcgccacatcgttcggaagcgcacgctgcggaggctgctgcaggagagggagcttgtggagcctcttacacccagtggagaagctcccaaccaagctctcttgaggatcttgaaggaaactgaattcaaaaagatcaaagtgctgggctccggtgcgttcggcacggtgtataagggactctggatcccagaaggtgagaaagttaaaattcccgtcgctatcaaggaattaagagaagcaacatctccgaaagccaacaaggaaatcctcgatgaagcctacgtgatggccagcgtggacaacccccacgtgtgccgcctgctgggcatctgcctcacctccaccgtgcagctcatcacgcagctcatgcccttcggctgcctcctggactatgtccgggaacacaaagacaatattggctcccagtacctgctcaactggtgtgtgcagatcgcaaagggcatgaactacttggaggaccgtcgcttggtgcaccgcgacctggcagccaggaacgtactggtgaaaacaccgcagcatgtcaagatcacagattttgggctggccaaactgctgggtgcggaagagaaagaataccatgcagaaggaggcaaagtgcctatcaagtggatggcattggaatcaattttacacagaatctatacccaccagagtgatgtctggagctacggggtgaccgtttgggagttgatgacctttggatccaagccatatgacggaatccctgccagcgagatctcctccatcctggagaaaggagaacgcctccctcagccacccatatgtaccatcgatgtctacatgatcatggtcaagtgctggatgatagacgcagatagtcgcccaaagttccgtgagttgatcatcgaattctccaaaatggcccgagacccccagcgctaccttgtcattcagggggatgaaagaatgcatttgccaagtcctacagactccaacttctaccgtgccctgatggatgaagaagacatggacgacgtggtggatgccgacgagtacctcatcccacagcagggcttcttcagcagcccctccacgtcacggactcccctcctgagctctctgagtgcaaccagcaacaattccaccgtggcttgcattgatagaaatgggctgcaaagctgtcccatcaaggaagacagcttcttgcagcgatacagctcagaccccacaggcgccttgactgaggacagcatagacgacaccttcctcccagtgcctgaatacataaaccagtccgttcccaaaaggcccgctggctctgtgcagaatcctgtctatcacaatcagcctctgaaccccgcgcccagcagagacccacactaccaggacccccacagcactgcagtgggcaaccccgagtatctcaacactgtccagcccacctgtgtcaacagcacattcgacagccctgcccactgggcccagaaaggcagccaccaaattagcctggacaaccctgactaccagcaggacttctttcccaaggaagccaagccaaatggcatctttaagggctccacagctgaaaatgcagaatacctaagggtcgcgccacaaagcagtgaatttattggagca

SEQ ID NO: 371 - protein, 1186 aa, Artificial
  unknown organism
LEEKKVCQGTSNKLTQLGTFEDHFLSLQRMFNNCEVVLGNLEITYVQRNYDLSFLKTIQEVAGYVLIALNTVERIPLENLQIIRGNMYYENSYALAVLSNYDANKTGLKELPMRNLQEILHGAVRFSNNPALCNVESIQWRDIVSSEFLSNMSMDFQNHLGSCQKCDPSCPNGSCWGAGEENCQKLTKIICAQQCSGRCRGKSPSDCCHNQCAAGCTGPRESDCLVCRKFRDEATCKDTCPPLMLYNPTTYQMDVNPEGKYSFGATCVKKCPRNYVVTDHGSCVRACGADSYEMEEDGVRKCKKCEGPCRKVCNGIGIGEFKDTLSINATNIKHFKNCTSISGDLHILPVAFRGDSFTHTPPLDPQELDILKTVKEITGFLLIQAWPENRTDLHAFENLEIIRGRTKQHGQFSLAVVSLNITSLGLRSLKEISDGDVIISGNKNLCYANTINWKKLFGTSSQKTKIISNRGENSCKATGQVCHALCSPEGCWGPEPRDCVSCQNVSRGRECVDKCNILEGEPREFVENSECIQCHPECLPQVMNITCTGRGPDNCIQCAHYIDGPHCVKTCPAGVMGENNTLVWKYADAGHVCHLCHPNCTYGCTGPGLEGCARNGPKIPSIATGMLGALLLLLVVALGIGLFMRRRHIVRKRTLRRLLQERELVEPLTPSGEAPNQALLRILKETEFKKIKVLGSGAFGTVYKGLWIPEGEKVKIPVAIKELREATSPKANKEILDEAYVMASVDNPHVCRLLGICLTSTVQLITQLMPFGCLLDYVREHKDNIGSQYLLNWCVQIAKGMNYLEDRRLVHRDLAARNVLVKTPQHVKITDFGLAKLLGAEEKEYHAEGGKVPIKWMALESILHRIYTHQSDVWSYGVTVWELMTFGSKPYDGIPASEISSILEKGERLPQPPICTIDVYMIMVKCWMIDADSRPKFRELIIEFSKMARDPQRYLVIQGDERMHLPSPTDSNFYRALMDEEDMDDVVDADEYLIPQQGFFSSPSTSRTPLLSSLSATSNNSTVACIDRNGLQSCPIKEDSFLQRYSSDPTGALTEDSIDDTFLPVPEYINQSVPKRPAGSVQNPVYHNQPLNPAPSRDPHYQDPHSTAVGNPEYLNTVQPTCVNSTFDSPAHWAQKGSHQISLDNPDYQQDFFPKEAKPNGIFKGSTAENAEYLRVAPQSSEFIGA

SEQ ID NO: 372 - DNA, 3630 bp, Artificial
  unknown organism
  misc_feature (1185)..(1185): n is a, c, g, or t
  misc_feature (1554)..(1554): n is a, c, g, or t
atgcgaccctccgggacggccggggcagcgctcctggcgctgctggctgcgctctgcccggcgagtcgggctctggaggaaaagaaagtttgccaaggcacgagtaacaaactcacgcagttgggcacttttgaagatcattttctcagcctccagaggatgttcaataactgtgaggtggtccttgggaatttggaaattacctacgtgcagaggaattatgatctttccttcttaaagaccatccaggaggtggctggttatgtcctcatcgccctcaacacagtggagcggattcctttggaaaacctgcagatcatcagaggaaacatgtactatgaaaattcctatgccttagcagtcttatctaactatgatgcaaataaaaccggactgaaggagctgcccatgagaaacttacaggaaatcctgcatggcgccgtgcggttcagcaacaaccctgccctgtgcaacgtggagagcatccagtggcgggacatagtcagcagcgagtttctcagcaacatgtcgatggacttccagaaccacctgggcagctgccaaaagtgtgatccaagctgtcccaatgggagctgctggggtgcaggagaggagaactgccagaaactgaccaaaatcatctgtgcccagcagtgctccgggcgctgccgcggcaagtcccccagtgactgctgccacaaccagtgtgccgcgggctgcacgggcccccgggagagcgactgcctggtctgccgcaaattccgagacgaagccacgtgcaaggacacctgccccccactcatgctctacaaccccaccacataccagatggatgtgaaccccgagggcaaatacagctttggtgccacctgcgtgaagaagtgtccccgtaattatgtggtgacagatcacggctcgtgcgtccgagcctgcggggccgacagctatgagatggaggaagacggcgtccgcaagtgtaagaagtgcgaagggccttgccgcaaagtgtgtaatggaataggtattggtgaatttaaagacacactctccataaatgctacaaatattaaacacttcaaaaactgcacctccatcagtggcgatctccacatcctgccggtggcatttaggggtgactccttcacacacactccgcctctggatccacaggaactggatattctnaaaaccgtaaaggaaatcacagggtttttgctgattcaggcttggcctgaaaacaggacggacctccatgcttttgagaacctagaaatcatacgtggcaggaccaagcaacacggtcagttttctcttgcggtcgtcagcctgaacataacatccttgggattacgctccctcaaggagataagcgatggagatgtgataatttcaggaaacaaaaatttgtgctatgcaaatacaataaactggaaaaaactgtttgggacctccagtcagaaaaccaaaattataagcaacagaggtgaaaacagctgcaaggccacgggccaggtctgccatgccttgtgctcccccgagggctgctggggcccngagcccagggactgcgtctcctgccagaatgtcagccgaggcagagaatgcgtggacaagtgcaacatcctggagggcgagccaagggagtttgtggagaactctgagtgcatacagtgccacccagaatgcctgccccaggtcatgaacatcacctgcacaggacggggaccagacaactgtatccagtgtgcccactacattgacggcccccactgcgtcaagacctgcccagcaggagtcatgggagaaaacaacaccctggtctggaagtacgcagacgccggccacgtgtgccacctgtgccatccaaactgcacctacggatgcactgggccaggtcttgaaggctgtgcaaggaacgggcctaagatcccatccatcgccactggcatgctgggggccctcctcttgctgctggtggtggccctggggatcggcctcttcatgcgaaggcgccacatcgttcggaagcgcacgctgcggaggctgctgcaggagagggagcttgtggagcctcttacacccagtggagaagctcccaaccaagctctcttgaggatcttgaaggaaactgaattcaaaaagatcaaagtgctgggctccggtgcgttcggcacggtgtataagggactctggatcccagaaggtgagaaagttaaaattcccgtcgctatcaaggaattaagagaagcaacatctccgaaagccaacaaggaaatcctcgatgaagcctacgtgatggccagcgtggacaacccccacgtgtgccgcctgctgggcatctgcctcacctccaccgtgcagctcatcacgcagctcatgcccttcggctgcctcctggactatgtccgggaacacaaagacaatattggctcccagtacctgctcaactggtgtgtgcagatcgcaaagggcatgaactacttggaggaccgtcgcttggtgcaccgcgacctggcagccaggaacgtactggtgaaaacaccgcagcatgtcaagatcacagattttgggctggccaaactgctgggtgcggaagagaaagaataccatgcagaaggaggcaaagtgcctatcaagtggatggcattggaatcaattttacacagaatctatacccaccagagtgatgtctggagctacggggtgaccgtttgggagttgatgacctttggatccaagccatatgacggaatccctgccagcgagatctcctccatcctggagaaaggagaacgcctccctcagccacccatatgtaccatcgatgtctacatgatcatggtcaagtgctggatgatagacgcagatagtcgcccaaagttccgtgagttgatcatcgaattctccaaaatggcccgagacccccagcgctaccttgtcattcagggggatgaaagaatgcatttgccaagtcctacagactccaacttctaccgtgccctgatggatgaagaagacatggacgacgtggtggatgccgacgagtacctcatcccacagcagggcttcttcagcagcccctccacgtcacggactcccctcctgagctctctgagtgcaaccagcaacaattccaccgtggcttgcattgatagaaatgggctgcaaagctgtcccatcaaggaagacagcttcttgcagcgatacagctcagaccccacaggcgccttgactgaggacagcatagacgacaccttcctcccagtgcctgaatacataaaccagtccgttcccaaaaggcccgctggctctgtgcagaatcctgtctatcacaatcagcctctgaaccccgcgcccagcagagacccacactaccaggacccccacagcactgcagtgggcaaccccgagtatctcaacactgtccagcccacctgtgtcaacagcacattcgacagccctgcccactgggcccagaaaggcagccaccaaattagcctggacaaccctgactaccagcaggacttctttcccaaggaagccaagccaaatggcatctttaagggctccacagctgaaaatgcagaatacctaagggtcgcgccacaaagcagtgaatttattggagca

SEQ ID NO: 373 - protein, 800 aa, Artificial
  unknown organism
DYKDDDDKSRTRSGSQLDGGLVLFSHRGTLDGGFRFRLSDGEHTSPGHFFRVTAQKQVLLSLKGSQTLTVCPGSVQPLSSQTLRASSSAGTDPQLLLYRVVRGPQLGRLFHAQQDSTGEALVNFTQAEVYAGNILYEHEMPPEPFWEAHDTLELQLSSPPARDVAATLAVAVSFEAACPQRPSHLWKNKGLWVPEGQRARITVAALDASNLLASVPSPQRSEHDVLFQVTQFPSRGQLLVSEEPLHAGQPHFLQSQLAAGQLVYAHGGGGTQQDGFHFRAHLQGPAGASVAGPQTSEAFAITVRDVNERPPQPQASVPLRLTRGSRAPISRAQLSVVDPDSAPGEIEYEVQRAPHNGFLSLVGGGLGPVTRFTQADVDSGRLAFVANGSSVAGIFQLSMSDGASPPLPMSLAVDILPSAIEVQLRAPLEVPQALGRSSLSQQQLRVVSDREEPEAAYRLIQGPQYGHLLVGGRPTSAFSQFQIDQGEVVFAFTNSSSSHDHFRVLALARGVNASAVVNVTVRALLHVWAGGPWPQGATLRLDPTVLDAGELANRTDSVPRFRLLEGPRHGRVVRVPRARTEPGGSQLVEQFTQQDLEDGRLGLEVGRPEGRAPGPAGDSLTLELWAQGVPPAVASLDFATEPYNAARPYSVALLSVPEAARTEAGKPESSTPTGEPGPMASSPEPAVAKGGFLSFLEANMFSVIIPMCLVLLLLALILPLLFYLRKRNKTGKHDVQVLTAKPRNGLAGDTETFRKVEPGQAIPLTAVPGQGPPPGGQPDPELLQFCRTPNPALKNGQYWV

SEQ ID NO: 374 - DNA, 2457 bp, Artificial
  unknown organism
atgggatggagctgtatcatcctcttcttggtagcaacagctacaggtgtacactccgactacaaagacgatgacgacaagtcccgtacgagatctggatcccaattggacggcgggctcgtgctgttctcacacagaggaaccctggatggaggcttccgcttccgcctctctgacggcgagcacacttcccccggacacttcttccgagtgacggcccagaagcaagtgctcctctcgctgaagggcagccagacactgactgtctgcccagggtccgtccagccactcagcagtcagaccctcagggccagctccagcgcaggcactgacccccagctcctgctctaccgtgtggtgcggggcccccagctaggccggctgttccacgcccagcaggacagcacaggggaggccctggtgaacttcactcaggcagaggtctacgctgggaatattctgtatgagcatgagatgccccccgagcccttttgggaggcccatgataccctagagctccagctgtcctcgccgcctgcccgggacgtggccgccacccttgctgtggctgtgtcttttgaggctgcctgtccccagcgccccagccacctctggaagaacaaaggtctctgggtccccgagggccagcgggccaggatcaccgtggctgctctggatgcctccaatctcttggccagcgttccatcaccccagcgctcagagcatgatgtgctcttccaggtcacacagttccccagccgcggccagctgttggtgtccgaggagcccctccatgctgggcagccccacttcctgcagtcccagctggctgcagggcagctagtgtatgcccacggcggtgggggcacccagcaggatggcttccactttcgtgcccacctccaggggccagcaggggcctccgtggctggaccccaaacctcagaggcctttgccatcacggtgagggatgtaaatgagcggccccctcagccacaggcctctgtcccactccggctcacccgaggctctcgtgcccccatctcccgggcccagctgagtgtggtggacccagactcagctcctggggagattgagtacgaggtccagcgggcaccccacaacggcttcctcagcctggtgggtggtggcctggggcccgtgacccgcttcacgcaagccgatgtggattcagggcggctggccttcgtggccaacgggagcagcgtggcaggcatcttccagctgagcatgtctgatggggccagcccacccctgcccatgtccctggctgtggacatcctaccatccgccatcgaggtgcagctgcgggcacccctggaggtgccccaagctttggggcgctcctcactgagccagcagcagctccgggtggtttcagatcgggaggagccagaggcagcataccggttgatccagggaccccagtatgggcatctcctggtgggcgggcggcccacctcggccttcagccaattccagatagaccagggcgaggtggtctttgccttcaccaactcctcctcctctcatgaccacttcagagtcctggcactggctaggggtgtcaatgcatcagccgtagtgaacgtcactgtgagggctctgctgcatgtgtgggcaggtgggccatggccccagggtgccaccctgcgcctggaccccaccgtcctagatgctggcgagctggccaaccgcacagacagtgtgccgcgcttccgcctcctggagggaccccggcatggccgcgtggtccgcgtgccccgagccaggacggagcccgggggcagccagctggtggagcagttcactcagcaggaccttgaggacgggaggctggggctggaggtgggcaggccagaggggagggcccccggccccgcaggtgacagtctcactctggagctgtgggcacagggcgtcccgcctgctgtggcctccctggactttgccactgagccttacaatgctgcccggccctacagcgtggccctgctcagtgtccccgaggccgcccggacggaagcagggaagccagagagcagcacccccacaggcgagccaggccccatggcatccagccctgagcccgctgtggccaagggaggcttcctgagctttctagaggccaacatgttcagcgtcatcatccccatgtgcctggtacttctgctcctggcgctcatcctgcccctgctcttctacctccgaaaacgcaacaagacgggcaagcatgacgtccaggtcctgactgccaagccccgcaacggcctggctggtgacaccgagacctttcgcaaggtggagccaggccaggccatcccgctcacagctgtgcctggccaggggccccctccaggaggccagcctgacccagagctgctgcagttctgccggacacccaaccctgcccttaagaatggccagtactgggtg

SEQ ID NO: 375 - protein, 807 aa, Artificial
  cynomolgus
  misc_feature (714)..(714): Xaa can be any naturally occurring amino acid
PSNGRVVLRAAPGTEVRSFTQAQLDGGLVLFSHRGTLDGGFRFGLSDGEHTSSGHFFRVTAQKQVLLSLEGSRTLTVCPGSVQPLSSQTLRASSSAGTDPQLLLYRVVRGPQLGRLFHAQQDSTGEALVNFTQAEVYAGNILYEHEMPTEPFWEAHDTLELQLSSPPARDVAATLAVAVSFEAACPQRPSHLWKNKGLWVPEGQRAKITMAALDASNLLASVPSSQRLEHDVLFQVTQFPSRGQLLVSEEPLHAGQPHFLQSQLAAGQLVYAHGGGGTQQDGFHFRAHLQGPAGATVAGPQTSEAFAITVRDVNERPPQPQASVPLRITRGSRAPISRAQLSVVDPDSAPGEIEYEVQRAPHNGFLSLVGGGPGPVNRFTQADVDSGRLAFVANGSSVAGVFQLSMSDGASPPLPMSLAVDILPSAIEVQLQAPLEVPQALGRSSLSQQQLRVVSDREEPEAAYRLIQGPKYGHLLVGGQPASAFSQLQIDQGEVVFAFTNFSSSHDHFRVLALARGVNASAVVNITVRALLHVWAGGPWPQGATLRLDPTILDAGELANRTGSVPRFRLLEGPRHGRVVRVPRARMEPGGSQLVEQFTQQDLEDGRLGLEVGRPEGRAPSPTGDSLTLELWAQGVPPAVASLDFATEPYNAARPYSVALLSVPEATRTEAGKPESSTPTGEPGPMASSPVPAVAKGGFLGFLEANMFSVIIPXCLVLLLLALILPLLFYLRKRNKTGKHDVQVLTAKPRNGLAGDTETFRKVEPGQAIPLTAVPGQGPPPGGQPDPELLQFCRTPNPALKNGQYWV

SEQ ID NO: 376 - DNA, 2421 bp, Artificial
  cynomolgus
cccagcaacggacgggtagtgctgcgggcggcgccgggcaccgaggtgcgcagcttcacgcaggcccagctggatggcggactcgtgctgttctcacacagaggaaccctggatggaggcttccgcttcggcctctccgatggcgagcacacttcctctggacacttcttccgagtgacggcccagaagcaagtgctcctctcgctggagggcagccggacactgactgtctgcccagggtccgtgcagccactcagcagtcagaccctcagagccagctccagcgcaggcaccgacccccagctcctgctctaccgtgtggtgcggggcccccagctaggccggctgttccatgcccagcaggacagcacaggggaggccctggtgaacttcactcaggcagaggtctatgctgggaatattctgtatgagcatgagatgcccaccgagcccttctgggaggcccatgataccctagagctccagctgtcctcaccacctgcccgggacgtggctgccacccttgctgtggctgtgtcttttgaggctgcctgtccccagcgccccagccacctctggaagaacaaaggtctctgggtccccgagggccagcgggccaagatcaccatggctgccctggatgcctccaacctcttggccagcgttccatcatcccagcgcctagagcatgatgtgctcttccaggtcacgcagttccccagccggggccagctattggtgtctgaggagcccctccacgctgggcagccccacttcctgcagtcccagctggctgcagggcagctagtgtatgcccacggcggtgggggtacccaacaggatggcttccactttcgtgcccacctccaggggccagcaggggccaccgtggctggaccccaaacctcagaggcttttgccatcacggtgcgggatgtaaatgagcggccccctcagccacaggcctctgtcccactccggatcacccgaggctctcgagcccccatctcccgggcccagctgagtgtcgtggacccagactcagctcctggggagattgagtatgaggtccagcgggcaccccacaacggcttcctcagcctggtgggtggtggcccggggcccgtgaaccgcttcacgcaagccgatgtggattcggggcggctggccttcgtggccaacgggagcagcgtagcaggcgtcttccagctgagcatgtctgatggggccagcccaccgctgcccatgtccctggccgtggacatcctaccatccgccatcgaggtgcagctgcaggcacccctggaggtgccccaagctttggggcgctcctcactgagccagcagcagctccgggtggtttcagatagggaggagccagaggcagcataccgcctcatccagggaccaaagtacgggcatctcctggtgggtgggcagcccgcctcggccttcagccaactccagatagaccagggcgaggtggtctttgccttcaccaacttctcctcctctcatgaccacttcagagtcctggcactggctaggggtgtcaacgcatcagccgtagtgaacatcactgtgagggctctgctgcacgtgtgggcaggtgggccatggccccagggtgctaccctgcgcctggacccaaccatcctagatgctggcgagctggccaaccgcacaggcagtgtgccccgcttccgcctcctggagggaccccggcatggccgcgtggtccgtgtgccccgagccaggatggagcctgggggcagccagctggtggagcagttcactcagcaggaccttgaggatgggaggctggggctggaggtgggcaggccagagggaagggcccccagccccacaggcgacagtctcactctggagctgtgggcacagggcgtcccacctgctgtggcctccctggactttgccactgagccttacaatgctgcccggccctacagcgtggccctgctcagtgtccccgaggccacccggacggaagcagggaagccagagagcagcacccccacaggcgagccaggccccatggcatctagccctgtgcctgctgtggccaagggaggcttcctgggcttccttgaggccaacatgttcagtgtcatcatccccrtgtgcctggtccttctgctcctggcgctcatcttgcccctgctcttctacctccgaaaacgcaacaagacgggcaagcatgacgtccaggtcctgactgccaagccccgcaatggtctggctggtgacactgagacctttcgcaaggtggagccaggccaggccatcccgctcacagctgtgcctggccaggggccccctccgggaggccagcctgacccagagctgctgcagttctgccggacacccaaccctgcccttaagaatggccagtactgggtg

SEQ ID NO: 377 - DNA, 18 bp, Artificial
  unknown organism
agagttctgggcctctgc

SEQ ID NO: 378 - DNA, 19 bp, Artificial
  unknown organism
cggatgggctcatagtctg

SEQ ID NO: 379 - protein, 192 aa, Artificial
  unknown organism
HHHHHHQDGNEEMGGITQTPYKVSISGTTVILTCPQYPGSEILWQHNDKNIGGDEDDKNIGSDEDHLSLKEFSELEQSGYYVCYPRGSKPEDANFYLYLRARVCENCMEMDVMSVATIVIVDICITGGLLLLVYYWSKNRKAKAKPVTRGAGAGGRQRGQNKERPPPVPNPDYEPIRKGQRDLYSGLNQRRI

SEQ ID NO: 380 - DNA, 633 bp, Artificial
  unknown organism
atgggatggagctgtatcatcctcttcttggtagcaacagctacaggtgtacactcccatcatcaccatcatcatcaagatggtaatgaagaaatgggtggtattacacagacaccatataaagtctccatctctggaaccacagtaatattgacatgccctcagtatcctggatctgaaatactatggcaacacaatgataaaaacataggcggtgatgaggatgataaaaacataggcagtgatgaggatcacctgtcactgaaggaattttcagaattggagcaaagtggttattatgtctgctaccccagaggaagcaaaccagaagatgcgaacttttatctctacctgagggcacgcgtgtgtgagaactgcatggagatggatgtgatgtcggtggccacaattgtcatagtggacatctgcatcactgggggcttgctgctgctggtttactactggagcaagaatagaaaggccaaggccaagcctgtgacacgaggagcgggtgctggcggcaggcaaaggggacaaaacaaggagaggccaccacctgttcccaacccagactatgagcccatccggaaaggccagcgggacctgtattctggcctgaatcagagacgcatc

SEQ ID NO: 381 - protein, 122 aa, Artificial
  unknown organism
QVQLVQSGAEVKKPGESVKVSCKASGYTFTNYGMNWVRQAPGQGLEWMGWINTYTGEPTYADDFKGRVTMSSDTSTSTAYLEINSLRSDDTAIYYCARWSWSDGYYVYFDYWGQGTTVTVSS

SEQ ID NO: 382 - protein, 5 aa, Artificial
  unknown organism
NYGMN

SEQ ID NO: 383 - protein, 17 aa, Artificial
  unknown organism
WINTYTGEPTYADDFKG

SEQ ID NO: 384 - protein, 13 aa, Artificial
  unknown organism
WSWSDGYYVYFDY

SEQ ID NO: 385 - DNA, 366 bp, Artificial
  unknown organism
caggtgcagctggtgcagtctggagctgaggtgaaaaagcctggagagtcagtcaaggtctcctgcaaggctagcgggtataccttcacaaactatggaatgaactgggtgaggcaggctccaggacagggtttagagtggatgggctggataaacacctacactggagagccaacatatgctgatgacttcaagggacgggttaccatgtcttcggatacctctaccagcactgcctatttggaaatcaacagcctcagaagtgatgacacggctatatattactgtgcgcgctggagttggagtgatggttactacgtttactttgactactggggccaaggcactacggtcaccgtctcctca

SEQ ID NO: 386 - protein, 113 aa, Artificial
  unknown organism
DIVMTQSPDSLTVSLGERTTINCKSSQSVLDSSKNKNSLAWYQQKPGQPPKLLLSWASTRESGIPDRFSGSGSGTDFTLTIDSLQPEDSATYYCQQSAHFPITFGQGTRLEIK

SEQ ID NO: 387 - protein, 17 aa, Artificial
  unknown organism
KSSQSVLDSSKNKNSLA

SEQ ID NO: 388 - protein, 7 aa, Artificial
  unknown organism
WASTRES

SEQ ID NO: 389 - protein, 9 aa, Artificial
  unknown orgainsm
QQSAHFPIT

SEQ ID NO: 390 - DNA, 339 bp, Artificial
  unknown orgainsm
gacatcgtgatgacacagtctccagactccctgactgtgtctctgggcgagaggaccaccatcaactgcaagtccagccagagtgttttagacagctccaagaataagaactccttagcttggtaccagcagaaaccaggacagcctcctaaattactcctttcctgggcatctacgcgggaatccgggatccctgaccgattcagtggcagcgggtctgggacagatttcactctcactattgacagcctgcagcctgaagattctgcaacttactattgtcaacagtctgcccacttcccgatcacctttggccaagggacacgactggagattaaa

SEQ ID NO: 391 - protein, 250 aa, Artificial
  unknown orgainsm
QVQLVQSGAEVKKPGESVKVSCKASGYTFTNYGMNWVRQAPGQGLEWMGWINTYTGEPTYADDFKGRVTMSSDTSTSTAYLEINSLRSDDTAIYYCARWSWSDGYYVYFDYWGQGTTVTVSSGGGGSGGGGSGGGGSDIVMTQSPDSLTVSLGERTTINCKSSQSVLDSSKNKNSLAWYQQKPGQPPKLLLSWASTRESGIPDRFSGSGSGTDFTLTIDSLQPEDSATYYCQQSAHFPITFGQGTRLEIK

SEQ ID NO: 392 - DNA, 750 bp, Artificial
  unknown orgainsm
caggtgcagctggtgcagtctggagctgaggtgaaaaagcctggagagtcagtcaaggtctcctgcaaggctagcgggtataccttcacaaactatggaatgaactgggtgaggcaggctccaggacagggtttagagtggatgggctggataaacacctacactggagagccaacatatgctgatgacttcaagggacgggttaccatgtcttcggatacctctaccagcactgcctatttggaaatcaacagcctcagaagtgatgacacggctatatattactgtgcgcgctggagttggagtgatggttactacgtttactttgactactggggccaaggcactacggtcaccgtctcctcaggtggtggtggttctggcggcggcggctccggtggtggtggttctgacatcgtgatgacacagtctccagactccctgactgtgtctctgggcgagaggaccaccatcaactgcaagtccagccagagtgttttagacagctccaagaataagaactccttagcttggtaccagcagaaaccaggacagcctcctaaattactcctttcctgggcatctacgcgggaatccgggatccctgaccgattcagtggcagcgggtctgggacagatttcactctcactattgacagcctgcagcctgaagattctgcaacttactattgtcaacagtctgcccacttcccgatcacctttggccaagggacacgactggagattaaa

SEQ ID NO: 393 - protein, 505 aa, Artificial
  unknown orgainsm
QVQLVQSGAEVKKPGESVKVSCKASGYTFTNYGMNWVRQAPGQGLEWMGWINTYTGEPTYADDFKGRVTMSSDTSTSTAYLEINSLRSDDTAIYYCARWSWSDGYYVYFDYWGQGTTVTVSSGGGGSGGGGSGGGGSDIVMTQSPDSLTVSLGERTTINCKSSQSVLDSSKNKNSLAWYQQKPGQPPKLLLSWASTRESGIPDRFSGSGSGTDFTLTIDSLQPEDSATYYCQQSAHFPITFGQGTRLEIKSGGGGSEVQLVESGGGLVQPGGSLKLSCAASGFTFNKYAMNWVRQAPGKGLEWVARIRSKYNNYATYYADSVKDRFTISRDDSKNTAYLQMNNLKTEDTAVYYCVRHGNFGNSYISYWAYWGQGTLVTVSSGGGGSGGGGSGGGGSQTVVTQEPSLTVSPGGTVTLTCGSSTGAVTSGYYPNWVQQKPGQAPRGLIGGTKFLAPGTPARFSGSLLGGKAALTLSGVQPEDEAEYYCALWYSNRWVFGGGTKLTVL

SEQ ID NO: 394 - DNA, 1515 bp, Artificial
  unknown orgainsm
caggtgcagctggtgcagtctggagctgaggtgaaaaagcctggagagtcagtcaaggtctcctgcaaggctagcgggtataccttcacaaactatggaatgaactgggtgaggcaggctccaggacagggtttagagtggatgggctggataaacacctacactggagagccaacatatgctgatgacttcaagggacgggttaccatgtcttcggatacctctaccagcactgcctatttggaaatcaacagcctcagaagtgatgacacggctatatattactgtgcgcgctggagttggagtgatggttactacgtttactttgactactggggccaaggcactacggtcaccgtctcctcaggtggtggtggttctggcggcggcggctccggtggtggtggttctgacatcgtgatgacacagtctccagactccctgactgtgtctctgggcgagaggaccaccatcaactgcaagtccagccagagtgttttagacagctccaagaataagaactccttagcttggtaccagcagaaaccaggacagcctcctaaattactcctttcctgggcatctacgcgggaatccgggatccctgaccgattcagtggcagcgggtctgggacagatttcactctcactattgacagcctgcagcctgaagattctgcaacttactattgtcaacagtctgcccacttcccgatcacctttggccaagggacacgactggagattaaatccggaggtggtggctccgaggtgcagctggtcgagtctggaggaggattggtgcagcctggagggtcattgaaactctcatgtgcagcctctggattcaccttcaataagtacgccatgaactgggtccgccaggctccaggaaagggtttggaatgggttgctcgcataagaagtaaatataataattatgcaacatattatgccgattcagtgaaagacaggttcaccatctccagagatgattcaaaaaacactgcctatctacaaatgaacaacttgaaaactgaggacactgccgtgtactactgtgtgagacatgggaacttcggtaatagctacatatcctactgggcttactggggccaagggactctggtcaccgtctcctcaggtggtggtggttctggcggcggcggctccggtggtggtggttctcagactgttgtgactcaggaaccttcactcaccgtatcacctggtggaacagtcacactcacttgtggctcctcgactggggctgttacatctggctactacccaaactgggtccaacaaaaaccaggtcaggcaccccgtggtctaataggtgggactaagttcctcgcccccggtactcctgccagattctcaggctccctgcttggaggcaaggctgccctcaccctctcaggggtacagccagaggatgaggcagaatattactgtgctctatggtacagcaaccgctgggtgttcggtggaggaaccaaactgactgtccta

SEQ ID NO: 395 - protein, 505 aa, Artificial
  unknown orgainsm
QVQLVQSGAEVKKPGESVKVSCKASGYTFTNYGMNWVRQAPGQGLEWMGWINTYTGEPTYADDFKGRVTMSSDTSTSTAYLEINSLRSDDTAIYYCARWSWSDGYYVYFDYWGQGTTVTVSSGGGGSGGGGSGGGGSDIVMTQSPDSLTVSLGERTTINCKSSQSVLDSSKNKNSLAWYQQKPGQPPKLLLSWASTRESGIPDRFSGSGSGTDFTLTIDSLQPEDSATYYCQQSAHFPITFGQGTRLEIKSGGGGSEVQLVESGGGLVQPGGSLKLSCAASGFTFNSYAMNWVRQAPGKGLEWVARIRSKYNNYATYYADSVKGRFTISRDDSKNTAYLQMNNLKTEDTAVYYCVRHGNFGNSYVSWWAYWGQGTLVTVSSGGGGSGGGGSGGGGSQTVVTQEPSLTVSPGGTVTLTCGSSTGAVTSGNYPNWVQQKPGQAPRGLIGGTKFLAPGTPARFSGSLLGGKAALTLSGVQPEDEAEYYCVLWYSNRWVFGGGTKLTVL

SEQ ID NO: 396 - DNA, 1515 bp, Artificial
  unknown organism
caggtgcagctggtgcagtctggagctgaggtgaaaaagcctggagagtcagtcaaggtctcctgcaaggctagcgggtataccttcacaaactatggaatgaactgggtgaggcaggctccaggacagggtttagagtggatgggctggataaacacctacactggagagccaacatatgctgatgacttcaagggacgggttaccatgtcttcggatacctctaccagcactgcctatttggaaatcaacagcctcagaagtgatgacacggctatatattactgtgcgcgctggagttggagtgatggttactacgtttactttgactactggggccaaggcactacggtcaccgtctcctcaggtggtggtggttctggcggcggcggctccggtggtggtggttctgacatcgtgatgacacagtctccagactccctgactgtgtctctgggcgagaggaccaccatcaactgcaagtccagccagagtgttttagacagctccaagaataagaactccttagcttggtaccagcagaaaccaggacagcctcctaaattactcctttcctgggcatctacgcgggaatccgggatccctgaccgattcagtggcagcgggtctgggacagatttcactctcactattgacagcctgcagcctgaagattctgcaacttactattgtcaacagtctgcccacttcccgatcacctttggccaagggacacgactggagattaaatccggaggtggtggctccgaggtgcagctggtcgagtctggaggaggattggtgcagcctggagggtcattgaaactctcatgtgcagcctctggattcaccttcaatagctacgccatgaactgggtccgccaggctccaggaaagggtttggaatgggttgctcgcataagaagtaaatataataattatgcaacatattatgccgattcagtgaaaggcaggttcaccatctccagagatgattcaaaaaacactgcctatctacaaatgaacaacttgaaaactgaggacactgccgtgtactactgtgtgagacatgggaacttcggtaatagctacgtttcctggtgggcttactggggccaagggactctggtcaccgtctcctcaggtggtggtggttctggcggcggcggctccggtggtggtggttctcagactgttgtgactcaggaaccttcactcaccgtatcacctggtggaacagtcacactcacttgtggctcctcgactggggctgttacatctggcaactacccaaactgggtccaacaaaaaccaggtcaggcaccccgtggtctaataggtgggactaagttcctcgcccccggtactcctgccagattctcaggctccctgcttggaggcaaggctgccctcaccctctcaggggtacagccagaggatgaggcagaatattactgtgttctatggtacagcaaccgctgggtgttcggtggaggaaccaaactgactgtccta

SEQ ID NO: 397 - protein, 505 aa, Artificial
  unknown organism
QVQLVQSGAEVKKPGESVKVSCKASGYTFTNYGMNWVRQAPGQGLEWMGWINTYTGEPTYADDFKGRVTMSSDTSTSTAYLEINSLRSDDTAIYYCARWSWSDGYYVYFDYWGQGTTVTVSSGGGGSGGGGSGGGGSDIVMTQSPDSLTVSLGERTTINCKSSQSVLDSSKNKNSLAWYQQKPGQPPKLLLSWASTRESGIPDRFSGSGSGTDFTLTIDSLQPEDSATYYCQQSAHFPITFGQGTRLEIKSGGGGSEVQLVESGGGLVQPGGSLKLSCAASGFTFNKYAMNWVRQAPGKGLEWVARIRSKYNNYATYYADSVKDRFTISRDDSKNTAYLQMNNLKTEDTAVYYCVRHGNFGNSYISYWAYWGQGTLVTVSSGGGGSGGGGSGGGGSQTVVTQEPSLTVSPGGTVTLTCGSSTGAVTSGNYPNWVQQKPGQAPRGLIGGTKFLAPGTPARFSGSLLGGKAALTLSGVQPEDEAEYYCVLWYSNRWVFGGGTKLTVL

SEQ ID NO: 398 - DNA, 1515 bp, Artificial
  unknown organism
caggtgcagctggtgcagtctggagctgaggtgaaaaagcctggagagtcagtcaaggtctcctgcaaggctagcgggtataccttcacaaactatggaatgaactgggtgaggcaggctccaggacagggtttagagtggatgggctggataaacacctacactggagagccaacatatgctgatgacttcaagggacgggttaccatgtcttcggatacctctaccagcactgcctatttggaaatcaacagcctcagaagtgatgacacggctatatattactgtgcgcgctggagttggagtgatggttactacgtttactttgactactggggccaaggcactacggtcaccgtctcctcaggtggtggtggttctggcggcggcggctccggtggtggtggttctgacatcgtgatgacacagtctccagactccctgactgtgtctctgggcgagaggaccaccatcaactgcaagtccagccagagtgttttagacagctccaagaataagaactccttagcttggtaccagcagaaaccaggacagcctcctaaattactcctttcctgggcatctacgcgggaatccgggatccctgaccgattcagtggcagcgggtctgggacagatttcactctcactattgacagcctgcagcctgaagattctgcaacttactattgtcaacagtctgcccacttcccgatcacctttggccaagggacacgactggagattaaatccggaggtggtggctccgaggtgcagctggtcgagtctggaggaggattggtgcagcctggagggtcattgaaactctcatgtgcagcctctggattcaccttcaataagtacgccatgaactgggtccgccaggctccaggaaagggtttggaatgggttgctcgcataagaagtaaatataataattatgcaacatattatgccgattcagtgaaagacaggttcaccatctccagagatgattcaaaaaacactgcctatctacaaatgaacaacttgaaaactgaggacactgccgtgtactactgtgtgagacatgggaacttcggtaatagctacatatcctactgggcttactggggccaagggactctggtcaccgtctcctcaggtggtggtggttctggcggcggcggctccggtggtggtggttctcagactgttgtgactcaggaaccttcactcaccgtatcacctggtggaacagtcacactcacttgtggctcctcgactggggctgttacatctggcaactacccaaactgggtccaacaaaaaccaggtcaggcaccccgtggtctaataggtgggactaagttcctcgcccccggtactcctgccagattctcaggctccctgcttggaggcaaggctgccctcaccctctcaggggtacagccagaggatgaggcagaatattactgtgttctatggtacagcaaccgctgggtgttcggtggaggaaccaaactgactgtccta

SEQ ID NO: 399 - protein, 122 aa, Artificial
  unknown organism
QVQLVQSGAEVKKPGASVKVSCKASGYTFTNYGMNWVKQAPGQGLKWMGWINTYTGEPTYADDFKGRVTMTSDTSTSTAYLELHNLRSDDTAVYYCARWSWSDGYYVYFDYWGQGTTVTVSS

SEQ ID NO: 400 - protein, 5 aa, Artificial
  unknown organism
NYGMN

SEQ ID NO: 401 - protein, 17 aa, Artificial
  unknown organism
WINTYTGEPTYADDFKG

SEQ ID NO: 402 - protein, 13 aa, Artificial
  unknown organism
WSWSDGYYVYFDY

SEQ ID NO: 403 - DNA, 366 bp, Artificial
  unknown organism
caggtgcagctggtgcagtctggagctgaggtgaagaagcctggagcgtcagtcaaggtctcctgcaaggctagcgggtataccttcacaaactatggaatgaactgggtgaagcaggctccaggacagggtttaaagtggatgggctggataaacacctacactggagagccaacatatgctgatgacttcaagggacgggttaccatgacttcggatacctctaccagcactgcctatttggaactccacaacctcagaagtgatgacacggctgtatattactgtgcgcgctggagttggagtgatggttactacgtttactttgactactggggccaaggcactacggtcaccgtctcctca

SEQ ID NO: 404 - protein, 113 aa, Artificial; identical to SEQ ID NO: 386
  unknown organism

SEQ ID NO: 405 - protein, 17 aa, Artificial
  unknown organism
KSSQSVLDSSKNKNSLA

SEQ ID NO: 406 - protein, 7 aa, Artificial
  unknown organism
WASTRES

SEQ ID NO: 407 - protein, 9 aa, Artificial
  unknown organism
QQSAHFPIT

SEQ ID NO: 408 - DNA, 339 bp, Artificial; identical to SEQ ID NO: 390
  unknown organism

SEQ ID NO: 409 - protein, 250 aa, Artificial
  unknown organism
QVQLVQSGAEVKKPGASVKVSCKASGYTFTNYGMNWVKQAPGQGLKWMGWINTYTGEPTYADDFKGRVTMTSDTSTSTAYLELHNLRSDDTAVYYCARWSWSDGYYVYFDYWGQGTTVTVSSGGGGSGGGGSGGGGSDIVMTQSPDSLTVSLGERTTINCKSSQSVLDSSKNKNSLAWYQQKPGQPPKLLLSWASTRESGIPDRFSGSGSGTDFTLTIDSLQPEDSATYYCQQSAHFPITFGQGTRLEIK

SEQ ID NO: 410 - DNA, 750 bp, Artificial
  unknown organism
caggtgcagctggtgcagtctggagctgaggtgaagaagcctggagcgtcagtcaaggtctcctgcaaggctagcgggtataccttcacaaactatggaatgaactgggtgaagcaggctccaggacagggtttaaagtggatgggctggataaacacctacactggagagccaacatatgctgatgacttcaagggacgggttaccatgacttcggatacctctaccagcactgcctatttggaactccacaacctcagaagtgatgacacggctgtatattactgtgcgcgctggagttggagtgatggttactacgtttactttgactactggggccaaggcactacggtcaccgtctcctcaggtggtggtggttctggcggcggcggctccggtggtggtggttctgacatcgtgatgacacagtctccagactccctgactgtgtctctgggcgagaggaccaccatcaactgcaagtccagccagagtgttttagacagctccaagaataagaactccttagcttggtaccagcagaaaccaggacagcctcctaaattactcctttcctgggcatctacgcgggaatccgggatccctgaccgattcagtggcagcgggtctgggacagatttcactctcactattgacagcctgcagcctgaagattctgcaacttactattgtcaacagtctgcccacttcccgatcacctttggccaagggacacgactggagattaaa

SEQ ID NO: 411 - protein, 505 aa, Artificial
  unknown organism
QVQLVQSGAEVKKPGASVKVSCKASGYTFTNYGMNWVKQAPGQGLKWMGWINTYTGEPTYADDFKGRVTMTSDTSTSTAYLELHNLRSDDTAVYYCARWSWSDGYYVYFDYWGQGTTVTVSSGGGGSGGGGSGGGGSDIVMTQSPDSLTVSLGERTTINCKSSQSVLDSSKNKNSLAWYQQKPGQPPKLLLSWASTRESGIPDRFSGSGSGTDFTLTIDSLQPEDSATYYCQQSAHFPITFGQGTRLEIKSGGGGSEVQLVESGGGLVQPGGSLKLSCAASGFTFNKYAMNWVRQAPGKGLEWVARIRSKYNNYATYYADSVKDRFTISRDDSKNTAYLQMNNLKTEDTAVYYCVRHGNFGNSYISYWAYWGQGTLVTVSSGGGGSGGGGSGGGGSQTVVTQEPSLTVSPGGTVTLTCGSSTGAVTSGYYPNWVQQKPGQAPRGLIGGTKFLAPGTPARFSGSLLGGKAALTLSGVQPEDEAEYYCALWYSNRWVFGGGTKLTVL

SEQ ID NO: 412 - DNA, 1515 bp, Artificial
  unknown organism
caggtgcagctggtgcagtctggagctgaggtgaagaagcctggagcgtcagtcaaggtctcctgcaaggctagcgggtataccttcacaaactatggaatgaactgggtgaagcaggctccaggacagggtttaaagtggatgggctggataaacacctacactggagagccaacatatgctgatgacttcaagggacgggttaccatgacttcggatacctctaccagcactgcctatttggaactccacaacctcagaagtgatgacacggctgtatattactgtgcgcgctggagttggagtgatggttactacgtttactttgactactggggccaaggcactacggtcaccgtctcctcaggtggtggtggttctggcggcggcggctccggtggtggtggttctgacatcgtgatgacacagtctccagactccctgactgtgtctctgggcgagaggaccaccatcaactgcaagtccagccagagtgttttagacagctccaagaataagaactccttagcttggtaccagcagaaaccaggacagcctcctaaattactcctttcctgggcatctacgcgggaatccgggatccctgaccgattcagtggcagcgggtctgggacagatttcactctcactattgacagcctgcagcctgaagattctgcaacttactattgtcaacagtctgcccacttcccgatcacctttggccaagggacacgactggagattaaatccggaggtggtggctccgaggtgcagctggtcgagtctggaggaggattggtgcagcctggagggtcattgaaactctcatgtgcagcctctggattcaccttcaataagtacgccatgaactgggtccgccaggctccaggaaagggtttggaatgggttgctcgcataagaagtaaatataataattatgcaacatattatgccgattcagtgaaagacaggttcaccatctccagagatgattcaaaaaacactgcctatctacaaatgaacaacttgaaaactgaggacactgccgtgtactactgtgtgagacatgggaacttcggtaatagctacatatcctactgggcttactggggccaagggactctggtcaccgtctcctcaggtggtggtggttctggcggcggcggctccggtggtggtggttctcagactgttgtgactcaggaaccttcactcaccgtatcacctggtggaacagtcacactcacttgtggctcctcgactggggctgttacatctggctactacccaaactgggtccaacaaaaaccaggtcaggcaccccgtggtctaataggtgggactaagttcctcgcccccggtactcctgccagattctcaggctccctgcttggaggcaaggctgccctcaccctctcaggggtacagccagaggatgaggcagaatattactgtgctctatggtacagcaaccgctgggtgttcggtggaggaaccaaactgactgtccta

SEQ ID NO: 413 - protein, 505 aa, Artificial
  unknown organism
QVQLVQSGAEVKKPGASVKVSCKASGYTFTNYGMNWVKQAPGQGLKWMGWINTYTGEPTYADDFKGRVTMTSDTSTSTAYLELHNLRSDDTAVYYCARWSWSDGYYVYFDYWGQGTTVTVSSGGGGSGGGGSGGGGSDIVMTQSPDSLTVSLGERTTINCKSSQSVLDSSKNKNSLAWYQQKPGQPPKLLLSWASTRESGIPDRFSGSGSGTDFTLTIDSLQPEDSATYYCQQSAHFPITFGQGTRLEIKSGGGGSEVQLVESGGGLVQPGGSLKLSCAASGFTFNSYAMNWVRQAPGKGLEWVARIRSKYNNYATYYADSVKGRFTISRDDSKNTAYLQMNNLKTEDTAVYYCVRHGNFGNSYVSWWAYWGQGTLVTVSSGGGGSGGGGSGGGGSQTVVTQEPSLTVSPGGTVTLTCGSSTGAVTSGNYPNWVQQKPGQAPRGLIGGTKFLAPGTPARFSGSLLGGKAALTLSGVQPEDEAEYYCVLWYSNRWVFGGGTKLTVL

SEQ ID NO: 414 - DNA, 1515 bp, Artificial
  unknown organism
caggtgcagctggtgcagtctggagctgaggtgaagaagcctggagcgtcagtcaaggtctcctgcaaggctagcgggtataccttcacaaactatggaatgaactgggtgaagcaggctccaggacagggtttaaagtggatgggctggataaacacctacactggagagccaacatatgctgatgacttcaagggacgggttaccatgacttcggatacctctaccagcactgcctatttggaactccacaacctcagaagtgatgacacggctgtatattactgtgcgcgctggagttggagtgatggttactacgtttactttgactactggggccaaggcactacggtcaccgtctcctcaggtggtggtggttctggcggcggcggctccggtggtggtggttctgacatcgtgatgacacagtctccagactccctgactgtgtctctgggcgagaggaccaccatcaactgcaagtccagccagagtgttttagacagctccaagaataagaactccttagcttggtaccagcagaaaccaggacagcctcctaaattactcctttcctgggcatctacgcgggaatccgggatccctgaccgattcagtggcagcgggtctgggacagatttcactctcactattgacagcctgcagcctgaagattctgcaacttactattgtcaacagtctgcccacttcccgatcacctttggccaagggacacgactggagattaaatccggaggtggtggctccgaggtgcagctggtcgagtctggaggaggattggtgcagcctggagggtcattgaaactctcatgtgcagcctctggattcaccttcaatagctacgccatgaactgggtccgccaggctccaggaaagggtttggaatgggttgctcgcataagaagtaaatataataattatgcaacatattatgccgattcagtgaaaggcaggttcaccatctccagagatgattcaaaaaacactgcctatctacaaatgaacaacttgaaaactgaggacactgccgtgtactactgtgtgagacatgggaacttcggtaatagctacgtttcctggtgggcttactggggccaagggactctggtcaccgtctcctcaggtggtggtggttctggcggcggcggctccggtggtggtggttctcagactgttgtgactcaggaaccttcactcaccgtatcacctggtggaacagtcacactcacttgtggctcctcgactggggctgttacatctggcaactacccaaactgggtccaacaaaaaccaggtcaggcaccccgtggtctaataggtgggactaagttcctcgcccccggtactcctgccagattctcaggctccctgcttggaggcaaggctgccctcaccctctcaggggtacagccagaggatgaggcagaatattactgtgttctatggtacagcaaccgctgggtgttcggtggaggaaccaaactgactgtccta

SEQ ID NO: 415 - protein, 505 aa, Artificial
  unknown organism
QVQLVQSGAEVKKPGASVKVSCKASGYTFTNYGMNWVKQAPGQGLKWMGWINTYTGEPTYADDFKGRVTMTSDTSTSTAYLELHNLRSDDTAVYYCARWSWSDGYYVYFDYWGQGTTVTVSSGGGGSGGGGSGGGGSDIVMTQSPDSLTVSLGERTTINCKSSQSVLDSSKNKNSLAWYQQKPGQPPKLLLSWASTRESGIPDRFSGSGSGTDFTLTIDSLQPEDSATYYCQQSAHFPITFGQGTRLEIKSGGGGSEVQLVESGGGLVQPGGSLKLSCAASGFTFNKYAMNWVRQAPGKGLEWVARIRSKYNNYATYYADSVKDRFTISRDDSKNTAYLQMNNLKTEDTAVYYCVRHGNFGNSYISYWAYWGQGTLVTVSSGGGGSGGGGSGGGGSQTVVTQEPSLTVSPGGTVTLTCGSSTGAVTSGNYPNWVQQKPGQAPRGLIGGTKFLAPGTPARFSGSLLGGKAALTLSGVQPEDEAEYYCVLWYSNRWVFGGGTKLTVL

SEQ ID NO: 416 - DNA, 1515 bp, Artificial
  unknown organism
caggtgcagctggtgcagtctggagctgaggtgaagaagcctggagcgtcagtcaaggtctcctgcaaggctagcgggtataccttcacaaactatggaatgaactgggtgaagcaggctccaggacagggtttaaagtggatgggctggataaacacctacactggagagccaacatatgctgatgacttcaagggacgggttaccatgacttcggatacctctaccagcactgcctatttggaactccacaacctcagaagtgatgacacggctgtatattactgtgcgcgctggagttggagtgatggttactacgtttactttgactactggggccaaggcactacggtcaccgtctcctcaggtggtggtggttctggcggcggcggctccggtggtggtggttctgacatcgtgatgacacagtctccagactccctgactgtgtctctgggcgagaggaccaccatcaactgcaagtccagccagagtgttttagacagctccaagaataagaactccttagcttggtaccagcagaaaccaggacagcctcctaaattactcctttcctgggcatctacgcgggaatccgggatccctgaccgattcagtggcagcgggtctgggacagatttcactctcactattgacagcctgcagcctgaagattctgcaacttactattgtcaacagtctgcccacttcccgatcacctttggccaagggacacgactggagattaaatccggaggtggtggctccgaggtgcagctggtcgagtctggaggaggattggtgcagcctggagggtcattgaaactctcatgtgcagcctctggattcaccttcaataagtacgccatgaactgggtccgccaggctccaggaaagggtttggaatgggttgctcgcataagaagtaaatataataattatgcaacatattatgccgattcagtgaaagacaggttcaccatctccagagatgattcaaaaaacactgcctatctacaaatgaacaacttgaaaactgaggacactgccgtgtactactgtgtgagacatgggaacttcggtaatagctacatatcctactgggcttactggggccaagggactctggtcaccgtctcctcaggtggtggtggttctggcggcggcggctccggtggtggtggttctcagactgttgtgactcaggaaccttcactcaccgtatcacctggtggaacagtcacactcacttgtggctcctcgactggggctgttacatctggcaactacccaaactgggtccaacaaaaaccaggtcaggcaccccgtggtctaataggtgggactaagttcctcgcccccggtactcctgccagattctcaggctccctgcttggaggcaaggctgccctcaccctctcaggggtacagccagaggatgaggcagaatattactgtgttctatggtacagcaaccgctgggtgttcggtggaggaaccaaactgactgtccta

SEQ ID NO: 417 - protein, 122 aa, Artificial
  unknown organism
QVQLVQSGAEVKKPGESVKVSCKASGYTFTNYGMNWVKQAPGQGLKWMGWINTYTGEPTYADDFKGRVTMTTDTSTSTAYMEIRNLRNDDTAVYYCARWSWSDGYYVYFDYWGQGTTVTVSS

SEQ ID NO: 418 - protein, 5 aa, Artificial
  unknown organism
NYGMN

SEQ ID NO: 419 - protein, 17 aa, Artificial
  unknown organism
WINTYTGEPTYADDFKG

SEQ ID NO: 420 - protein, 13 aa, Artificial
  unknown organism
WSWSDGYYVYFDY

SEQ ID NO: 421 - DNA, 366 bp, Artificial
  unknown organism
caggtgcagctggtgcagtctggagctgaggtgaagaagcctggagagtcagtcaaggtctcctgcaaggctagcgggtataccttcacaaactatggaatgaactgggtgaagcaggctccaggacagggtttaaagtggatgggctggataaacacctacactggagagccaacatatgctgatgacttcaagggacgggttaccatgactacggatacctctaccagcactgcctatatggaaatccgcaacctcagaaatgatgacacggctgtatattactgtgcgcgctggagttggagtgatggttactacgtttactttgactactggggccaaggcactacggtcaccgtctcctca

SEQ ID NO: 422 - protein, 113 aa, Artificial; identical to SEQ ID NO: 386
  unknown organism

SEQ ID NO: 423 - protein, 17 aa, Artificial
  unknown organism
KSSQSVLDSSKNKNSLA

SEQ ID NO: 424 - protein, 7 aa, Artificial
  unknown organism
WASTRES

SEQ ID NO: 425 - protein, 9 aa, Artificial
  unknown organism
QQSAHFPIT

SEQ ID NO: 426 - DNA, 339 bp, Artificial; identical to SEQ ID NO: 390
  unknown organism

SEQ ID NO: 427 - protein, 250 aa, Artificial
  unknown organism
QVQLVQSGAEVKKPGESVKVSCKASGYTFTNYGMNWVKQAPGQGLKWMGWINTYTGEPTYADDFKGRVTMTTDTSTSTAYMEIRNLRNDDTAVYYCARWSWSDGYYVYFDYWGQGTTVTVSSGGGGSGGGGSGGGGSDIVMTQSPDSLTVSLGERTTINCKSSQSVLDSSKNKNSLAWYQQKPGQPPKLLLSWASTRESGIPDRFSGSGSGTDFTLTIDSLQPEDSATYYCQQSAHFPITFGQGTRLEIK

SEQ ID NO: 428 - DNA, 750 bp, Artificial
  unknown organism
caggtgcagctggtgcagtctggagctgaggtgaagaagcctggagagtcagtcaaggtctcctgcaaggctagcgggtataccttcacaaactatggaatgaactgggtgaagcaggctccaggacagggtttaaagtggatgggctggataaacacctacactggagagccaacatatgctgatgacttcaagggacgggttaccatgactacggatacctctaccagcactgcctatatggaaatccgcaacctcagaaatgatgacacggctgtatattactgtgcgcgctggagttggagtgatggttactacgtttactttgactactggggccaaggcactacggtcaccgtctcctcaggtggtggtggttctggcggcggcggctccggtggtggtggttctgacatcgtgatgacacagtctccagactccctgactgtgtctctgggcgagaggaccaccatcaactgcaagtccagccagagtgttttagacagctccaagaataagaactccttagcttggtaccagcagaaaccaggacagcctcctaaattactcctttcctgggcatctacgcgggaatccgggatccctgaccgattcagtggcagcgggtctgggacagatttcactctcactattgacagcctgcagcctgaagattctgcaacttactattgtcaacagtctgcccacttcccgatcacctttggccaagggacacgactggagattaaa

SEQ ID NO: 429 - protein, 505 aa, Artificial
  unknown organism
QVQLVQSGAEVKKPGESVKVSCKASGYTFTNYGMNWVKQAPGQGLKWMGWINTYTGEPTYADDFKGRVTMTTDTSTSTAYMEIRNLRNDDTAVYYCARWSWSDGYYVYFDYWGQGTTVTVSSGGGGSGGGGSGGGGSDIVMTQSPDSLTVSLGERTTINCKSSQSVLDSSKNKNSLAWYQQKPGQPPKLLLSWASTRESGIPDRFSGSGSGTDFTLTIDSLQPEDSATYYCQQSAHFPITFGQGTRLEIKSGGGGSEVQLVESGGGLVQPGGSLKLSCAASGFTFNKYAMNWVRQAPGKGLEWVARIRSKYNNYATYYADSVKDRFTISRDDSKNTAYLQMNNLKTEDTAVYYCVRHGNFGNSYISYWAYWGQGTLVTVSSGGGGSGGGGSGGGGSQTVVTQEPSLTVSPGGTVTLTCGSSTGAVTSGYYPNWVQQKPGQAPRGLIGGTKFLAPGTPARFSGSLLGGKAALTLSGVQPEDEAEYYCALWYSNRWVFGGGTKLTVL

SEQ ID NO: 430 - DNA, 1515 bp, Artificial
  unknown organism
caggtgcagctggtgcagtctggagctgaggtgaagaagcctggagagtcagtcaaggtctcctgcaaggctagcgggtataccttcacaaactatggaatgaactgggtgaagcaggctccaggacagggtttaaagtggatgggctggataaacacctacactggagagccaacatatgctgatgacttcaagggacgggttaccatgactacggatacctctaccagcactgcctatatggaaatccgcaacctcagaaatgatgacacggctgtatattactgtgcgcgctggagttggagtgatggttactacgtttactttgactactggggccaaggcactacggtcaccgtctcctcaggtggtggtggttctggcggcggcggctccggtggtggtggttctgacatcgtgatgacacagtctccagactccctgactgtgtctctgggcgagaggaccaccatcaactgcaagtccagccagagtgttttagacagctccaagaataagaactccttagcttggtaccagcagaaaccaggacagcctcctaaattactcctttcctgggcatctacgcgggaatccgggatccctgaccgattcagtggcagcgggtctgggacagatttcactctcactattgacagcctgcagcctgaagattctgcaacttactattgtcaacagtctgcccacttcccgatcacctttggccaagggacacgactggagattaaatccggaggtggtggctccgaggtgcagctggtcgagtctggaggaggattggtgcagcctggagggtcattgaaactctcatgtgcagcctctggattcaccttcaataagtacgccatgaactgggtccgccaggctccaggaaagggtttggaatgggttgctcgcataagaagtaaatataataattatgcaacatattatgccgattcagtgaaagacaggttcaccatctccagagatgattcaaaaaacactgcctatctacaaatgaacaacttgaaaactgaggacactgccgtgtactactgtgtgagacatgggaacttcggtaatagctacatatcctactgggcttactggggccaagggactctggtcaccgtctcctcaggtggtggtggttctggcggcggcggctccggtggtggtggttctcagactgttgtgactcaggaaccttcactcaccgtatcacctggtggaacagtcacactcacttgtggctcctcgactggggctgttacatctggctactacccaaactgggtccaacaaaaaccaggtcaggcaccccgtggtctaataggtgggactaagttcctcgcccccggtactcctgccagattctcaggctccctgcttggaggcaaggctgccctcaccctctcaggggtacagccagaggatgaggcagaatattactgtgctctatggtacagcaaccgctgggtgttcggtggaggaaccaaactgactgtccta

SEQ ID NO: 431 - protein, 505 aa, Artificial
  unknown organism
QVQLVQSGAEVKKPGESVKVSCKASGYTFTNYGMNWVKQAPGQGLKWMGWINTYTGEPTYADDFKGRVTMTTDTSTSTAYMEIRNLRNDDTAVYYCARWSWSDGYYVYFDYWGQGTTVTVSSGGGGSGGGGSGGGGSDIVMTQSPDSLTVSLGERTTINCKSSQSVLDSSKNKNSLAWYQQKPGQPPKLLLSWASTRESGIPDRFSGSGSGTDFTLTIDSLQPEDSATYYCQQSAHFPITFGQGTRLEIKSGGGGSEVQLVESGGGLVQPGGSLKLSCAASGFTFNSYAMNWVRQAPGKGLEWVARIRSKYNNYATYYADSVKGRFTISRDDSKNTAYLQMNNLKTEDTAVYYCVRHGNFGNSYVSWWAYWGQGTLVTVSSGGGGSGGGGSGGGGSQTVVTQEPSLTVSPGGTVTLTCGSSTGAVTSGNYPNWVQQKPGQAPRGLIGGTKFLAPGTPARFSGSLLGGKAALTLSGVQPEDEAEYYCVLWYSNRWVFGGGTKLTVL

SEQ ID NO: 432 - DNA, 1515 bp, Artificial
  unknown organism
caggtgcagctggtgcagtctggagctgaggtgaagaagcctggagagtcagtcaaggtctcctgcaaggctagcgggtataccttcacaaactatggaatgaactgggtgaagcaggctccaggacagggtttaaagtggatgggctggataaacacctacactggagagccaacatatgctgatgacttcaagggacgggttaccatgactacggatacctctaccagcactgcctatatggaaatccgcaacctcagaaatgatgacacggctgtatattactgtgcgcgctggagttggagtgatggttactacgtttactttgactactggggccaaggcactacggtcaccgtctcctcaggtggtggtggttctggcggcggcggctccggtggtggtggttctgacatcgtgatgacacagtctccagactccctgactgtgtctctgggcgagaggaccaccatcaactgcaagtccagccagagtgttttagacagctccaagaataagaactccttagcttggtaccagcagaaaccaggacagcctcctaaattactcctttcctgggcatctacgcgggaatccgggatccctgaccgattcagtggcagcgggtctgggacagatttcactctcactattgacagcctgcagcctgaagattctgcaacttactattgtcaacagtctgcccacttcccgatcacctttggccaagggacacgactggagattaaatccggaggtggtggctccgaggtgcagctggtcgagtctggaggaggattggtgcagcctggagggtcattgaaactctcatgtgcagcctctggattcaccttcaatagctacgccatgaactgggtccgccaggctccaggaaagggtttggaatgggttgctcgcataagaagtaaatataataattatgcaacatattatgccgattcagtgaaaggcaggttcaccatctccagagatgattcaaaaaacactgcctatctacaaatgaacaacttgaaaactgaggacactgccgtgtactactgtgtgagacatgggaacttcggtaatagctacgtttcctggtgggcttactggggccaagggactctggtcaccgtctcctcaggtggtggtggttctggcggcggcggctccggtggtggtggttctcagactgttgtgactcaggaaccttcactcaccgtatcacctggtggaacagtcacactcacttgtggctcctcgactggggctgttacatctggcaactacccaaactgggtccaacaaaaaccaggtcaggcaccccgtggtctaataggtgggactaagttcctcgcccccggtactcctgccagattctcaggctccctgcttggaggcaaggctgccctcaccctctcaggggtacagccagaggatgaggcagaatattactgtgttctatggtacagcaaccgctgggtgttcggtggaggaaccaaactgactgtccta

SEQ ID NO: 433 - protein, 505 aa, Artificial
  unknown organism
QVQLVQSGAEVKKPGESVKVSCKASGYTFTNYGMNWVKQAPGQGLKWMGWINTYTGEPTYADDFKGRVTMTTDTSTSTAYMEIRNLRNDDTAVYYCARWSWSDGYYVYFDYWGQGTTVTVSSGGGGSGGGGSGGGGSDIVMTQSPDSLTVSLGERTTINCKSSQSVLDSSKNKNSLAWYQQKPGQPPKLLLSWASTRESGIPDRFSGSGSGTDFTLTIDSLQPEDSATYYCQQSAHFPITFGQGTRLEIKSGGGGSEVQLVESGGGLVQPGGSLKLSCAASGFTFNKYAMNWVRQAPGKGLEWVARIRSKYNNYATYYADSVKDRFTISRDDSKNTAYLQMNNLKTEDTAVYYCVRHGNFGNSYISYWAYWGQGTLVTVSSGGGGSGGGGSGGGGSQTVVTQEPSLTVSPGGTVTLTCGSSTGAVTSGNYPNWVQQKPGQAPRGLIGGTKFLAPGTPARFSGSLLGGKAALTLSGVQPEDEAEYYCVLWYSNRWVFGGGTKLTVL

SEQ ID NO: 434 - DNA, 1515 bp, Artificial
  unknown organism
caggtgcagctggtgcagtctggagctgaggtgaagaagcctggagagtcagtcaaggtctcctgcaaggctagcgggtataccttcacaaactatggaatgaactgggtgaagcaggctccaggacagggtttaaagtggatgggctggataaacacctacactggagagccaacatatgctgatgacttcaagggacgggttaccatgactacggatacctctaccagcactgcctatatggaaatccgcaacctcagaaatgatgacacggctgtatattactgtgcgcgctggagttggagtgatggttactacgtttactttgactactggggccaaggcactacggtcaccgtctcctcaggtggtggtggttctggcggcggcggctccggtggtggtggttctgacatcgtgatgacacagtctccagactccctgactgtgtctctgggcgagaggaccaccatcaactgcaagtccagccagagtgttttagacagctccaagaataagaactccttagcttggtaccagcagaaaccaggacagcctcctaaattactcctttcctgggcatctacgcgggaatccgggatccctgaccgattcagtggcagcgggtctgggacagatttcactctcactattgacagcctgcagcctgaagattctgcaacttactattgtcaacagtctgcccacttcccgatcacctttggccaagggacacgactggagattaaatccggaggtggtggctccgaggtgcagctggtcgagtctggaggaggattggtgcagcctggagggtcattgaaactctcatgtgcagcctctggattcaccttcaataagtacgccatgaactgggtccgccaggctccaggaaagggtttggaatgggttgctcgcataagaagtaaatataataattatgcaacatattatgccgattcagtgaaagacaggttcaccatctccagagatgattcaaaaaacactgcctatctacaaatgaacaacttgaaaactgaggacactgccgtgtactactgtgtgagacatgggaacttcggtaatagctacatatcctactgggcttactggggccaagggactctggtcaccgtctcctcaggtggtggtggttctggcggcggcggctccggtggtggtggttctcagactgttgtgactcaggaaccttcactcaccgtatcacctggtggaacagtcacactcacttgtggctcctcgactggggctgttacatctggcaactacccaaactgggtccaacaaaaaccaggtcaggcaccccgtggtctaataggtgggactaagttcctcgcccccggtactcctgccagattctcaggctccctgcttggaggcaaggctgccctcaccctctcaggggtacagccagaggatgaggcagaatattactgtgttctatggtacagcaaccgctgggtgttcggtggaggaaccaaactgactgtccta

SEQ ID NO: 435 - protein, 122 aa, Artificial
  unknown organism
QVQLVQSGAEVKKPGESVKVSCKASGYTFTNYGMNWVKQAPGQGLKWMGWINTYTGEPTYADDFKGRVTMTSDTSTSTAYMEISSLRSDDTAVYYCARWSWSDGYYVYFDYWGQGTTVTVSS

SEQ ID NO: 436 - protein, 5 aa, Artificial
  unknown organism
NYGMN

SEQ ID NO: 437 - protein, 17 aa, Artificial
  unknown organism
WINTYTGEPTYADDFKG

SEQ ID NO: 438 - protein, 13 aa, Artificial
  unknown organism
WSWSDGYYVYFDY

SEQ ID NO: 439 - DNA, 366 bp, Artificial
  unknown organism
caggtgcagctggtgcagtctggagctgaggtgaagaagcctggagagtcagtcaaggtctcctgcaaggctagcgggtataccttcacaaactatggaatgaactgggtgaagcaggctccaggacagggtttaaagtggatgggctggataaacacctacactggagagccaacatatgctgatgacttcaagggacgggttaccatgacttcggatacctctaccagcactgcctatatggaaatcagcagcctcagaagtgatgacacggctgtatattactgtgcgcgctggagttggagtgatggttactacgtttactttgactactggggccaaggcactacggtcaccgtctcctca

SEQ ID NO: 440 - protein, 113 aa, Artificial; identical to SEQ ID NO: 386
  unknown organism

SEQ ID NO: 441 - protein, 17 aa, Artificial
  unknown organism
KSSQSVLDSSKNKNSLA

SEQ ID NO: 442 - protein, 7 aa, Artificial
  unknown organism
WASTRES

SEQ ID NO: 443 - protein, 9 aa, Artificial
  unknown organism
QQSAHFPIT

SEQ ID NO: 444 - DNA, 339 bp, Artificial; identical to SEQ ID NO: 390
  unknown organism

SEQ ID NO: 445 - protein, 250 aa, Artificial
  unknown organism
QVQLVQSGAEVKKPGESVKVSCKASGYTFTNYGMNWVKQAPGQGLKWMGWINTYTGEPTYADDFKGRVTMTSDTSTSTAYMEISSLRSDDTAVYYCARWSWSDGYYVYFDYWGQGTTVTVSSGGGGSGGGGSGGGGSDIVMTQSPDSLTVSLGERTTINCKSSQSVLDSSKNKNSLAWYQQKPGQPPKLLLSWASTRESGIPDRFSGSGSGTDFTLTIDSLQPEDSATYYCQQSAHFPITFGQGTRLEIK

SEQ ID NO: 446 - DNA, 750 bp, Artificial
  unknown organism
caggtgcagctggtgcagtctggagctgaggtgaagaagcctggagagtcagtcaaggtctcctgcaaggctagcgggtataccttcacaaactatggaatgaactgggtgaagcaggctccaggacagggtttaaagtggatgggctggataaacacctacactggagagccaacatatgctgatgacttcaagggacgggttaccatgacttcggatacctctaccagcactgcctatatggaaatcagcagcctcagaagtgatgacacggctgtatattactgtgcgcgctggagttggagtgatggttactacgtttactttgactactggggccaaggcactacggtcaccgtctcctcaggtggtggtggttctggcggcggcggctccggtggtggtggttctgacatcgtgatgacacagtctccagactccctgactgtgtctctgggcgagaggaccaccatcaactgcaagtccagccagagtgttttagacagctccaagaataagaactccttagcttggtaccagcagaaaccaggacagcctcctaaattactcctttcctgggcatctacgcgggaatccgggatccctgaccgattcagtggcagcgggtctgggacagatttcactctcactattgacagcctgcagcctgaagattctgcaacttactattgtcaacagtctgcccacttcccgatcacctttggccaagggacacgactggagattaaa

SEQ ID NO: 447 - protein, 505 aa, Artificial
  unknown organism
QVQLVQSGAEVKKPGESVKVSCKASGYTFTNYGMNWVKQAPGQGLKWMGWINTYTGEPTYADDFKGRVTMTSDTSTSTAYMEISSLRSDDTAVYYCARWSWSDGYYVYFDYWGQGTTVTVSSGGGGSGGGGSGGGGSDIVMTQSPDSLTVSLGERTTINCKSSQSVLDSSKNKNSLAWYQQKPGQPPKLLLSWASTRESGIPDRFSGSGSGTDFTLTIDSLQPEDSATYYCQQSAHFPITFGQGTRLEIKSGGGGSEVQLVESGGGLVQPGGSLKLSCAASGFTFNKYAMNWVRQAPGKGLEWVARIRSKYNNYATYYADSVKDRFTISRDDSKNTAYLQMNNLKTEDTAVYYCVRHGNFGNSYISYWAYWGQGTLVTVSSGGGGSGGGGSGGGGSQTVVTQEPSLTVSPGGTVTLTCGSSTGAVTSGYYPNWVQQKPGQAPRGLIGGTKFLAPGTPARFSGSLLGGKAALTLSGVQPEDEAEYYCALWYSNRWVFGGGTKLTVL

SEQ ID NO: 448 - DNA, 1515 bp, Artificial
  unknown organism
caggtgcagctggtgcagtctggagctgaggtgaagaagcctggagagtcagtcaaggtctcctgcaaggctagcgggtataccttcacaaactatggaatgaactgggtgaagcaggctccaggacagggtttaaagtggatgggctggataaacacctacactggagagccaacatatgctgatgacttcaagggacgggttaccatgacttcggatacctctaccagcactgcctatatggaaatcagcagcctcagaagtgatgacacggctgtatattactgtgcgcgctggagttggagtgatggttactacgtttactttgactactggggccaaggcactacggtcaccgtctcctcaggtggtggtggttctggcggcggcggctccggtggtggtggttctgacatcgtgatgacacagtctccagactccctgactgtgtctctgggcgagaggaccaccatcaactgcaagtccagccagagtgttttagacagctccaagaataagaactccttagcttggtaccagcagaaaccaggacagcctcctaaattactcctttcctgggcatctacgcgggaatccgggatccctgaccgattcagtggcagcgggtctgggacagatttcactctcactattgacagcctgcagcctgaagattctgcaacttactattgtcaacagtctgcccacttcccgatcacctttggccaagggacacgactggagattaaatccggaggtggtggctccgaggtgcagctggtcgagtctggaggaggattggtgcagcctggagggtcattgaaactctcatgtgcagcctctggattcaccttcaataagtacgccatgaactgggtccgccaggctccaggaaagggtttggaatgggttgctcgcataagaagtaaatataataattatgcaacatattatgccgattcagtgaaagacaggttcaccatctccagagatgattcaaaaaacactgcctatctacaaatgaacaacttgaaaactgaggacactgccgtgtactactgtgtgagacatgggaacttcggtaatagctacatatcctactgggcttactggggccaagggactctggtcaccgtctcctcaggtggtggtggttctggcggcggcggctccggtggtggtggttctcagactgttgtgactcaggaaccttcactcaccgtatcacctggtggaacagtcacactcacttgtggctcctcgactggggctgttacatctggctactacccaaactgggtccaacaaaaaccaggtcaggcaccccgtggtctaataggtgggactaagttcctcgcccccggtactcctgccagattctcaggctccctgcttggaggcaaggctgccctcaccctctcaggggtacagccagaggatgaggcagaatattactgtgctctatggtacagcaaccgctgggtgttcggtggaggaaccaaactgactgtccta

SEQ ID NO: 449 - protein, 505 aa, Artificial
  unknown organism
QVQLVQSGAEVKKPGESVKVSCKASGYTFTNYGMNWVKQAPGQGLKWMGWINTYTGEPTYADDFKGRVTMTSDTSTSTAYMEISSLRSDDTAVYYCARWSWSDGYYVYFDYWGQGTTVTVSSGGGGSGGGGSGGGGSDIVMTQSPDSLTVSLGERTTINCKSSQSVLDSSKNKNSLAWYQQKPGQPPKLLLSWASTRESGIPDRFSGSGSGTDFTLTIDSLQPEDSATYYCQQSAHFPITFGQGTRLEIKSGGGGSEVQLVESGGGLVQPGGSLKLSCAASGFTFNSYAMNWVRQAPGKGLEWVARIRSKYNNYATYYADSVKGRFTISRDDSKNTAYLQMNNLKTEDTAVYYCVRHGNFGNSYVSWWAYWGQGTLVTVSSGGGGSGGGGSGGGGSQTVVTQEPSLTVSPGGTVTLTCGSSTGAVTSGNYPNWVQQKPGQAPRGLIGGTKFLAPGTPARFSGSLLGGKAALTLSGVQPEDEAEYYCVLWYSNRWVFGGGTKLTVL

SEQ ID NO: 450 - DNA, 1515 bp, Artificial
  unknown organism
caggtgcagctggtgcagtctggagctgaggtgaagaagcctggagagtcagtcaaggtctcctgcaaggctagcgggtataccttcacaaactatggaatgaactgggtgaagcaggctccaggacagggtttaaagtggatgggctggataaacacctacactggagagccaacatatgctgatgacttcaagggacgggttaccatgacttcggatacctctaccagcactgcctatatggaaatcagcagcctcagaagtgatgacacggctgtatattactgtgcgcgctggagttggagtgatggttactacgtttactttgactactggggccaaggcactacggtcaccgtctcctcaggtggtggtggttctggcggcggcggctccggtggtggtggttctgacatcgtgatgacacagtctccagactccctgactgtgtctctgggcgagaggaccaccatcaactgcaagtccagccagagtgttttagacagctccaagaataagaactccttagcttggtaccagcagaaaccaggacagcctcctaaattactcctttcctgggcatctacgcgggaatccgggatccctgaccgattcagtggcagcgggtctgggacagatttcactctcactattgacagcctgcagcctgaagattctgcaacttactattgtcaacagtctgcccacttcccgatcacctttggccaagggacacgactggagattaaatccggaggtggtggctccgaggtgcagctggtcgagtctggaggaggattggtgcagcctggagggtcattgaaactctcatgtgcagcctctggattcaccttcaatagctacgccatgaactgggtccgccaggctccaggaaagggtttggaatgggttgctcgcataagaagtaaatataataattatgcaacatattatgccgattcagtgaaaggcaggttcaccatctccagagatgattcaaaaaacactgcctatctacaaatgaacaacttgaaaactgaggacactgccgtgtactactgtgtgagacatgggaacttcggtaatagctacgtttcctggtgggcttactggggccaagggactctggtcaccgtctcctcaggtggtggtggttctggcggcggcggctccggtggtggtggttctcagactgttgtgactcaggaaccttcactcaccgtatcacctggtggaacagtcacactcacttgtggctcctcgactggggctgttacatctggcaactacccaaactgggtccaacaaaaaccaggtcaggcaccccgtggtctaataggtgggactaagttcctcgcccccggtactcctgccagattctcaggctccctgcttggaggcaaggctgccctcaccctctcaggggtacagccagaggatgaggcagaatattactgtgttctatggtacagcaaccgctgggtgttcggtggaggaaccaaactgactgtccta

SEQ ID NO: 451 - protein, 505 aa, Artificial
  unknown organism
QVQLVQSGAEVKKPGESVKVSCKASGYTFTNYGMNWVKQAPGQGLKWMGWINTYTGEPTYADDFKGRVTMTSDTSTSTAYMEISSLRSDDTAVYYCARWSWSDGYYVYFDYWGQGTTVTVSSGGGGSGGGGSGGGGSDIVMTQSPDSLTVSLGERTTINCKSSQSVLDSSKNKNSLAWYQQKPGQPPKLLLSWASTRESGIPDRFSGSGSGTDFTLTIDSLQPEDSATYYCQQSAHFPITFGQGTRLEIKSGGGGSEVQLVESGGGLVQPGGSLKLSCAASGFTFNKYAMNWVRQAPGKGLEWVARIRSKYNNYATYYADSVKDRFTISRDDSKNTAYLQMNNLKTEDTAVYYCVRHGNFGNSYISYWAYWGQGTLVTVSSGGGGSGGGGSGGGGSQTVVTQEPSLTVSPGGTVTLTCGSSTGAVTSGNYPNWVQQKPGQAPRGLIGGTKFLAPGTPARFSGSLLGGKAALTLSGVQPEDEAEYYCVLWYSNRWVFGGGTKLTVL

SEQ ID NO: 452 - DNA, 1515 bp, Artificial
  unknown organism
caggtgcagctggtgcagtctggagctgaggtgaagaagcctggagagtcagtcaaggtctcctgcaaggctagcgggtataccttcacaaactatggaatgaactgggtgaagcaggctccaggacagggtttaaagtggatgggctggataaacacctacactggagagccaacatatgctgatgacttcaagggacgggttaccatgacttcggatacctctaccagcactgcctatatggaaatcagcagcctcagaagtgatgacacggctgtatattactgtgcgcgctggagttggagtgatggttactacgtttactttgactactggggccaaggcactacggtcaccgtctcctcaggtggtggtggttctggcggcggcggctccggtggtggtggttctgacatcgtgatgacacagtctccagactccctgactgtgtctctgggcgagaggaccaccatcaactgcaagtccagccagagtgttttagacagctccaagaataagaactccttagcttggtaccagcagaaaccaggacagcctcctaaattactcctttcctgggcatctacgcgggaatccgggatccctgaccgattcagtggcagcgggtctgggacagatttcactctcactattgacagcctgcagcctgaagattctgcaacttactattgtcaacagtctgcccacttcccgatcacctttggccaagggacacgactggagattaaatccggaggtggtggctccgaggtgcagctggtcgagtctggaggaggattggtgcagcctggagggtcattgaaactctcatgtgcagcctctggattcaccttcaataagtacgccatgaactgggtccgccaggctccaggaaagggtttggaatgggttgctcgcataagaagtaaatataataattatgcaacatattatgccgattcagtgaaagacaggttcaccatctccagagatgattcaaaaaacactgcctatctacaaatgaacaacttgaaaactgaggacactgccgtgtactactgtgtgagacatgggaacttcggtaatagctacatatcctactgggcttactggggccaagggactctggtcaccgtctcctcaggtggtggtggttctggcggcggcggctccggtggtggtggttctcagactgttgtgactcaggaaccttcactcaccgtatcacctggtggaacagtcacactcacttgtggctcctcgactggggctgttacatctggcaactacccaaactgggtccaacaaaaaccaggtcaggcaccccgtggtctaataggtgggactaagttcctcgcccccggtactcctgccagattctcaggctccctgcttggaggcaaggctgccctcaccctctcaggggtacagccagaggatgaggcagaatattactgtgttctatggtacagcaaccgctgggtgttcggtggaggaaccaaactgactgtccta

SEQ ID NO: 453 - protein, 122 aa, Artificial
  unknown organism
QVQLVQSGAEVKKPGESVKVSCKASGYTFTNYGMNWVKQAPGQGLEWMGWINTYTGETNYADKFQGRVTFTSDTSTSTAYMELRNLKSDDTAVYYCARWSWSDGYYVYFDYWGQGTTVTVSS

SEQ ID NO: 454 - protein, 5 aa, Artificial
  unknown organism
NYGMN

SEQ ID NO: 455 - protein, 17 aa, Artificial
  unknown organism
WINTYTGETNYADKFQG

SEQ ID NO: 456 - protein, 13 aa, Artificial
  unknown organism
WSWSDGYYVYFDY

SEQ ID NO: 457 - DNA, 366 bp, Artificial
  unknown organism
caggtgcagctggtgcagtctggagctgaggtgaagaagcctggagagtcagtcaaggtctcctgcaaggctagcgggtataccttcacaaactatggaatgaactgggtgaagcaggctccaggacagggtttagagtggatgggctggataaacacctacactggagagacaaactatgctgataagttccagggacgcgttaccttcacttcggatacctctaccagcactgcctatatggaactccgcaacctcaaaagtgatgacacggctgtatattactgtgcgcgctggagttggagtgatggttactacgtttactttgactactggggccaaggcactacggtcaccgtctcctca

SEQ ID NO: 458 - protein, 113 aa, Artificial
  unknown organism
DIVMTQSPDSMTVSLGERTTINCKSSQSVLDSSTNKNSLAWYQQKPGQPPKLLLSWASTRESGIPDRFSGSGSGTDFTLTIDSLQPEDSATYYCQQSAHFPITFGQGTRLDIK

SEQ ID NO: 459 - protein, 17 aa, Artificial
  unknown organism
KSSQSVLDSSTNKNSLA

SEQ ID NO: 460 - protein, 6 aa, Artificial
  unknown organism
WASTRE

SEQ ID NO: 461 - protein, 9 aa, Artificial
  unknown organism
QQSAHFPIT

SEQ ID NO: 462 - DNA, 339 bp, Artificial
  unknown organism
gacatcgtgatgacacagtctccagactccatgactgtgtctctgggcgagaggaccaccatcaactgcaagtccagccagagtgttttagacagctccacgaataagaactccttagcttggtaccagcagaaaccaggacagcctcctaaattactcctttcctgggcatctacgcgggaatccgggatccctgaccgattcagtggcagcgggtctgggacagatttcactctcactattgacagcctgcagcctgaagattctgcaacttactattgtcaacagtctgcccacttcccgatcacctttggccaagggacacgactggacattaaa

SEQ ID NO: 463 - protein, 250 aa, Artificial
  unknown organism
QVQLVQSGAEVKKPGESVKVSCKASGYTFTNYGMNWVKQAPGQGLEWMGWINTYTGETNYADKFQGRVTFTSDTSTSTAYMELRNLKSDDTAVYYCARWSWSDGYYVYFDYWGQGTTVTVSSGGGGSGGGGSGGGGSDIVMTQSPDSMTVSLGERTTINCKSSQSVLDSSTNKNSLAWYQQKPGQPPKLLLSWASTRESGIPDRFSGSGSGTDFTLTIDSLQPEDSATYYCQQSAHFPITFGQGTRLDIK

SEQ ID NO: 464 - DNA, 750 bp, Artificial
  unknown organism
caggtgcagctggtgcagtctggagctgaggtgaagaagcctggagagtcagtcaaggtctcctgcaaggctagcgggtataccttcacaaactatggaatgaactgggtgaagcaggctccaggacagggtttagagtggatgggctggataaacacctacactggagagacaaactatgctgataagttccagggacgcgttaccttcacttcggatacctctaccagcactgcctatatggaactccgcaacctcaaaagtgatgacacggctgtatattactgtgcgcgctggagttggagtgatggttactacgtttactttgactactggggccaaggcactacggtcaccgtctcctcaggtggtggtggttctggcggcggcggctccggtggtggtggttctgacatcgtgatgacacagtctccagactccatgactgtgtctctgggcgagaggaccaccatcaactgcaagtccagccagagtgttttagacagctccacgaataagaactccttagcttggtaccagcagaaaccaggacagcctcctaaattactcctttcctgggcatctacgcgggaatccgggatccctgaccgattcagtggcagcgggtctgggacagatttcactctcactattgacagcctgcagcctgaagattctgcaacttactattgtcaacagtctgcccacttcccgatcacctttggccaagggacacgactggacattaaa

SEQ ID NO: 465 - protein, 505 aa, Artificial
  unknown organism
QVQLVQSGAEVKKPGESVKVSCKASGYTFTNYGMNWVKQAPGQGLEWMGWINTYTGETNYADKFQGRVTFTSDTSTSTAYMELRNLKSDDTAVYYCARWSWSDGYYVYFDYWGQGTTVTVSSGGGGSGGGGSGGGGSDIVMTQSPDSMTVSLGERTTINCKSSQSVLDSSTNKNSLAWYQQKPGQPPKLLLSWASTRESGIPDRFSGSGSGTDFTLTIDSLQPEDSATYYCQQSAHFPITFGQGTRLDIKSGGGGSEVQLVESGGGLVQPGGSLKLSCAASGFTFNKYAMNWVRQAPGKGLEWVARIRSKYNNYATYYADSVKDRFTISRDDSKNTAYLQMNNLKTEDTAVYYCVRHGNFGNSYISYWAYWGQGTLVTVSSGGGGSGGGGSGGGGSQTVVTQEPSLTVSPGGTVTLTCGSSTGAVTSGYYPNWVQQKPGQAPRGLIGGTKFLAPGTPARFSGSLLGGKAALTLSGVQPEDEAEYYCALWYSNRWVFGGGTKLTVL

SEQ ID NO: 466 - DNA, 1515 bp, Artificial
  unknown organism
caggtgcagctggtgcagtctggagctgaggtgaagaagcctggagagtcagtcaaggtctcctgcaaggctagcgggtataccttcacaaactatggaatgaactgggtgaagcaggctccaggacagggtttagagtggatgggctggataaacacctacactggagagacaaactatgctgataagttccagggacgcgttaccttcacttcggatacctctaccagcactgcctatatggaactccgcaacctcaaaagtgatgacacggctgtatattactgtgcgcgctggagttggagtgatggttactacgtttactttgactactggggccaaggcactacggtcaccgtctcctcaggtggtggtggttctggcggcggcggctccggtggtggtggttctgacatcgtgatgacacagtctccagactccatgactgtgtctctgggcgagaggaccaccatcaactgcaagtccagccagagtgttttagacagctccacgaataagaactccttagcttggtaccagcagaaaccaggacagcctcctaaattactcctttcctgggcatctacgcgggaatccgggatccctgaccgattcagtggcagcgggtctgggacagatttcactctcactattgacagcctgcagcctgaagattctgcaacttactattgtcaacagtctgcccacttcccgatcacctttggccaagggacacgactggacattaaatccggaggtggtggctccgaggtgcagctggtcgagtctggaggaggattggtgcagcctggagggtcattgaaactctcatgtgcagcctctggattcaccttcaataagtacgccatgaactgggtccgccaggctccaggaaagggtttggaatgggttgctcgcataagaagtaaatataataattatgcaacatattatgccgattcagtgaaagacaggttcaccatctccagagatgattcaaaaaacactgcctatctacaaatgaacaacttgaaaactgaggacactgccgtgtactactgtgtgagacatgggaacttcggtaatagctacatatcctactgggcttactggggccaagggactctggtcaccgtctcctcaggtggtggtggttctggcggcggcggctccggtggtggtggttctcagactgttgtgactcaggaaccttcactcaccgtatcacctggtggaacagtcacactcacttgtggctcctcgactggggctgttacatctggctactacccaaactgggtccaacaaaaaccaggtcaggcaccccgtggtctaataggtgggactaagttcctcgcccccggtactcctgccagattctcaggctccctgcttggaggcaaggctgccctcaccctctcaggggtacagccagaggatgaggcagaatattactgtgctctatggtacagcaaccgctgggtgttcggtggaggaaccaaactgactgtccta

SEQ ID NO: 467 - protein, 505 aa, Artificial
  unknown organism
QVQLVQSGAEVKKPGESVKVSCKASGYTFTNYGMNWVKQAPGQGLEWMGWINTYTGETNYADKFQGRVTFTSDTSTSTAYMELRNLKSDDTAVYYCARWSWSDGYYVYFDYWGQGTTVTVSSGGGGSGGGGSGGGGSDIVMTQSPDSMTVSLGERTTINCKSSQSVLDSSTNKNSLAWYQQKPGQPPKLLLSWASTRESGIPDRFSGSGSGTDFTLTIDSLQPEDSATYYCQQSAHFPITFGQGTRLDIKSGGGGSEVQLVESGGGLVQPGGSLKLSCAASGFTFNSYAMNWVRQAPGKGLEWVARIRSKYNNYATYYADSVKGRFTISRDDSKNTAYLQMNNLKTEDTAVYYCVRHGNFGNSYVSWWAYWGQGTLVTVSSGGGGSGGGGSGGGGSQTVVTQEPSLTVSPGGTVTLTCGSSTGAVTSGNYPNWVQQKPGQAPRGLIGGTKFLAPGTPARFSGSLLGGKAALTLSGVQPEDEAEYYCVLWYSNRWVFGGGTKLTVL

SEQ ID NO: 468 - DNA, 1515 bp, Artificial
  unknown organism
caggtgcagctggtgcagtctggagctgaggtgaagaagcctggagagtcagtcaaggtctcctgcaaggctagcgggtataccttcacaaactatggaatgaactgggtgaagcaggctccaggacagggtttagagtggatgggctggataaacacctacactggagagacaaactatgctgataagttccagggacgcgttaccttcacttcggatacctctaccagcactgcctatatggaactccgcaacctcaaaagtgatgacacggctgtatattactgtgcgcgctggagttggagtgatggttactacgtttactttgactactggggccaaggcactacggtcaccgtctcctcaggtggtggtggttctggcggcggcggctccggtggtggtggttctgacatcgtgatgacacagtctccagactccatgactgtgtctctgggcgagaggaccaccatcaactgcaagtccagccagagtgttttagacagctccacgaataagaactccttagcttggtaccagcagaaaccaggacagcctcctaaattactcctttcctgggcatctacgcgggaatccgggatccctgaccgattcagtggcagcgggtctgggacagatttcactctcactattgacagcctgcagcctgaagattctgcaacttactattgtcaacagtctgcccacttcccgatcacctttggccaagggacacgactggacattaaatccggaggtggtggctccgaggtgcagctggtcgagtctggaggaggattggtgcagcctggagggtcattgaaactctcatgtgcagcctctggattcaccttcaatagctacgccatgaactgggtccgccaggctccaggaaagggtttggaatgggttgctcgcataagaagtaaatataataattatgcaacatattatgccgattcagtgaaaggcaggttcaccatctccagagatgattcaaaaaacactgcctatctacaaatgaacaacttgaaaactgaggacactgccgtgtactactgtgtgagacatgggaacttcggtaatagctacgtttcctggtgggcttactggggccaagggactctggtcaccgtctcctcaggtggtggtggttctggcggcggcggctccggtggtggtggttctcagactgttgtgactcaggaaccttcactcaccgtatcacctggtggaacagtcacactcacttgtggctcctcgactggggctgttacatctggcaactacccaaactgggtccaacaaaaaccaggtcaggcaccccgtggtctaataggtgggactaagttcctcgcccccggtactcctgccagattctcaggctccctgcttggaggcaaggctgccctcaccctctcaggggtacagccagaggatgaggcagaatattactgtgttctatggtacagcaaccgctgggtgttcggtggaggaaccaaactgactgtccta

SEQ ID NO: 469 - protein, 505 aa, Artificial
  unknown organism
QVQLVQSGAEVKKPGESVKVSCKASGYTFTNYGMNWVKQAPGQGLEWMGWINTYTGETNYADKFQGRVTFTSDTSTSTAYMELRNLKSDDTAVYYCARWSWSDGYYVYFDYWGQGTTVTVSSGGGGSGGGGSGGGGSDIVMTQSPDSMTVSLGERTTINCKSSQSVLDSSTNKNSLAWYQQKPGQPPKLLLSWASTRESGIPDRFSGSGSGTDFTLTIDSLQPEDSATYYCQQSAHFPITFGQGTRLDIKSGGGGSEVQLVESGGGLVQPGGSLKLSCAASGFTFNKYAMNWVRQAPGKGLEWVARIRSKYNNYATYYADSVKDRFTISRDDSKNTAYLQMNNLKTEDTAVYYCVRHGNFGNSYISYWAYWGQGTLVTVSSGGGGSGGGGSGGGGSQTVVTQEPSLTVSPGGTVTLTCGSSTGAVTSGNYPNWVQQKPGQAPRGLIGGTKFLAPGTPARFSGSLLGGKAALTLSGVQPEDEAEYYCVLWYSNRWVFGGGTKLTVL

SEQ ID NO: 470 - DNA, 1515 bp, Artificial
  unknown organism
caggtgcagctggtgcagtctggagctgaggtgaagaagcctggagagtcagtcaaggtctcctgcaaggctagcgggtataccttcacaaactatggaatgaactgggtgaagcaggctccaggacagggtttagagtggatgggctggataaacacctacactggagagacaaactatgctgataagttccagggacgcgttaccttcacttcggatacctctaccagcactgcctatatggaactccgcaacctcaaaagtgatgacacggctgtatattactgtgcgcgctggagttggagtgatggttactacgtttactttgactactggggccaaggcactacggtcaccgtctcctcaggtggtggtggttctggcggcggcggctccggtggtggtggttctgacatcgtgatgacacagtctccagactccatgactgtgtctctgggcgagaggaccaccatcaactgcaagtccagccagagtgttttagacagctccacgaataagaactccttagcttggtaccagcagaaaccaggacagcctcctaaattactcctttcctgggcatctacgcgggaatccgggatccctgaccgattcagtggcagcgggtctgggacagatttcactctcactattgacagcctgcagcctgaagattctgcaacttactattgtcaacagtctgcccacttcccgatcacctttggccaagggacacgactggacattaaatccggaggtggtggctccgaggtgcagctggtcgagtctggaggaggattggtgcagcctggagggtcattgaaactctcatgtgcagcctctggattcaccttcaataagtacgccatgaactgggtccgccaggctccaggaaagggtttggaatgggttgctcgcataagaagtaaatataataattatgcaacatattatgccgattcagtgaaagacaggttcaccatctccagagatgattcaaaaaacactgcctatctacaaatgaacaacttgaaaactgaggacactgccgtgtactactgtgtgagacatgggaacttcggtaatagctacatatcctactgggcttactggggccaagggactctggtcaccgtctcctcaggtggtggtggttctggcggcggcggctccggtggtggtggttctcagactgttgtgactcaggaaccttcactcaccgtatcacctggtggaacagtcacactcacttgtggctcctcgactggggctgttacatctggcaactacccaaactgggtccaacaaaaaccaggtcaggcaccccgtggtctaataggtgggactaagttcctcgcccccggtactcctgccagattctcaggctccctgcttggaggcaaggctgccctcaccctctcaggggtacagccagaggatgaggcagaatattactgtgttctatggtacagcaaccgctgggtgttcggtggaggaaccaaactgactgtccta

SEQ ID NO: 471 - protein, 122 aa, Artificial; identical to SEQ ID NO: 453
  unknown organism

SEQ ID NO: 472 - protein, 5 aa, Artificial
  unknown organism
NYGMN

SEQ ID NO: 473 - protein, 17 aa, Artificial
  unknown organism
WINTYTGETNYADKFQG

SEQ ID NO: 474 - protein, 13 aa, Artificial
  unknown organism
WSWSDGYYVYFDY

SEQ ID NO: 475 - DNA, 366 bp, Artificial; identical to SEQ ID NO: 457
  unknown organism

SEQ ID NO: 476 - protein, 113 aa, Artificial
  unknown organism
DIVMTQSPDSLSVSLGERTTINCKSSQSVLDSSTNKNSLAWYQQKPGQPPKLLLSWASTRESGIPDRFSGSGSGTDFTLTIDSLQPEDSATYYCQQSAHFPITFGQGTRLEIK

SEQ ID NO: 477 - protein, 17 aa, Artificial
  unknown organism
KSSQSVLDSSTNKNSLA

SEQ ID NO: 478 - protein, 7 aa, Artificial
  unknown organism
WASTRES

SEQ ID NO: 479 - protein, 9 aa, Artificial
  unknown organism
QQSAHFPIT

SEQ ID NO: 480 - DNA, 339 bp, Artificial
  unknown organism
gacatcgtgatgacacagtctccagactccctgtctgtgtctctgggcgagaggaccaccatcaactgcaagtccagccagagtgttttagacagctccacgaataagaactccttagcttggtaccagcagaaaccaggacagcctcctaaattactcctttcctgggcatctacgcgggaatccgggatccctgaccgattcagtggcagcgggtctgggacagatttcactctcactattgacagcctgcagcctgaagattctgcaacttactattgtcaacagtctgcccacttcccgatcacctttggccaagggacacgactggagattaaa

SEQ ID NO: 481 - protein, 250 aa, Artificial
  unknown organism
QVQLVQSGAEVKKPGESVKVSCKASGYTFTNYGMNWVKQAPGQGLEWMGWINTYTGETNYADKFQGRVTFTSDTSTSTAYMELRNLKSDDTAVYYCARWSWSDGYYVYFDYWGQGTTVTVSSGGGGSGGGGSGGGGSDIVMTQSPDSLSVSLGERTTINCKSSQSVLDSSTNKNSLAWYQQKPGQPPKLLLSWASTRESGIPDRFSGSGSGTDFTLTIDSLQPEDSATYYCQQSAHFPITFGQGTRLEIK

SEQ ID NO: 482 - DNA, 750 bp, Artificial
  unknown organism
caggtgcagctggtgcagtctggagctgaggtgaagaagcctggagagtcagtcaaggtctcctgcaaggctagcgggtataccttcacaaactatggaatgaactgggtgaagcaggctccaggacagggtttagagtggatgggctggataaacacctacactggagagacaaactatgctgataagttccagggacgcgttaccttcacttcggatacctctaccagcactgcctatatggaactccgcaacctcaaaagtgatgacacggctgtatattactgtgcgcgctggagttggagtgatggttactacgtttactttgactactggggccaaggcactacggtcaccgtctcctcaggtggtggtggttctggcggcggcggctccggtggtggtggttctgacatcgtgatgacacagtctccagactccctgtctgtgtctctgggcgagaggaccaccatcaactgcaagtccagccagagtgttttagacagctccacgaataagaactccttagcttggtaccagcagaaaccaggacagcctcctaaattactcctttcctgggcatctacgcgggaatccgggatccctgaccgattcagtggcagcgggtctgggacagatttcactctcactattgacagcctgcagcctgaagattctgcaacttactattgtcaacagtctgcccacttcccgatcacctttggccaagggacacgactggagattaaa

SEQ ID NO: 483 - protein, 505 aa, Artificial
  unknown organism
QVQLVQSGAEVKKPGESVKVSCKASGYTFTNYGMNWVKQAPGQGLEWMGWINTYTGETNYADKFQGRVTFTSDTSTSTAYMELRNLKSDDTAVYYCARWSWSDGYYVYFDYWGQGTTVTVSSGGGGSGGGGSGGGGSDIVMTQSPDSLSVSLGERTTINCKSSQSVLDSSTNKNSLAWYQQKPGQPPKLLLSWASTRESGIPDRFSGSGSGTDFTLTIDSLQPEDSATYYCQQSAHFPITFGQGTRLEIKSGGGGSEVQLVESGGGLVQPGGSLKLSCAASGFTFNKYAMNWVRQAPGKGLEWVARIRSKYNNYATYYADSVKDRFTISRDDSKNTAYLQMNNLKTEDTAVYYCVRHGNFGNSYISYWAYWGQGTLVTVSSGGGGSGGGGSGGGGSQTVVTQEPSLTVSPGGTVTLTCGSSTGAVTSGYYPNWVQQKPGQAPRGLIGGTKFLAPGTPARFSGSLLGGKAALTLSGVQPEDEAEYYCALWYSNRWVFGGGTKLTVL

SEQ ID NO: 484 - DNA, 1515 bp, Artificial
  unknown organism
caggtgcagctggtgcagtctggagctgaggtgaagaagcctggagagtcagtcaaggtctcctgcaaggctagcgggtataccttcacaaactatggaatgaactgggtgaagcaggctccaggacagggtttagagtggatgggctggataaacacctacactggagagacaaactatgctgataagttccagggacgcgttaccttcacttcggatacctctaccagcactgcctatatggaactccgcaacctcaaaagtgatgacacggctgtatattactgtgcgcgctggagttggagtgatggttactacgtttactttgactactggggccaaggcactacggtcaccgtctcctcaggtggtggtggttctggcggcggcggctccggtggtggtggttctgacatcgtgatgacacagtctccagactccctgtctgtgtctctgggcgagaggaccaccatcaactgcaagtccagccagagtgttttagacagctccacgaataagaactccttagcttggtaccagcagaaaccaggacagcctcctaaattactcctttcctgggcatctacgcgggaatccgggatccctgaccgattcagtggcagcgggtctgggacagatttcactctcactattgacagcctgcagcctgaagattctgcaacttactattgtcaacagtctgcccacttcccgatcacctttggccaagggacacgactggagattaaatccggaggtggtggctccgaggtgcagctggtcgagtctggaggaggattggtgcagcctggagggtcattgaaactctcatgtgcagcctctggattcaccttcaataagtacgccatgaactgggtccgccaggctccaggaaagggtttggaatgggttgctcgcataagaagtaaatataataattatgcaacatattatgccgattcagtgaaagacaggttcaccatctccagagatgattcaaaaaacactgcctatctacaaatgaacaacttgaaaactgaggacactgccgtgtactactgtgtgagacatgggaacttcggtaatagctacatatcctactgggcttactggggccaagggactctggtcaccgtctcctcaggtggtggtggttctggcggcggcggctccggtggtggtggttctcagactgttgtgactcaggaaccttcactcaccgtatcacctggtggaacagtcacactcacttgtggctcctcgactggggctgttacatctggctactacccaaactgggtccaacaaaaaccaggtcaggcaccccgtggtctaataggtgggactaagttcctcgcccccggtactcctgccagattctcaggctccctgcttggaggcaaggctgccctcaccctctcaggggtacagccagaggatgaggcagaatattactgtgctctatggtacagcaaccgctgggtgttcggtggaggaaccaaactgactgtccta

SEQ ID NO: 485 - protein, 505 aa, Artificial
  unknown organism
QVQLVQSGAEVKKPGESVKVSCKASGYTFTNYGMNWVKQAPGQGLEWMGWINTYTGETNYADKFQGRVTFTSDTSTSTAYMELRNLKSDDTAVYYCARWSWSDGYYVYFDYWGQGTTVTVSSGGGGSGGGGSGGGGSDIVMTQSPDSLSVSLGERTTINCKSSQSVLDSSTNKNSLAWYQQKPGQPPKLLLSWASTRESGIPDRFSGSGSGTDFTLTIDSLQPEDSATYYCQQSAHFPITFGQGTRLEIKSGGGGSEVQLVESGGGLVQPGGSLKLSCAASGFTFNSYAMNWVRQAPGKGLEWVARIRSKYNNYATYYADSVKGRFTISRDDSKNTAYLQMNNLKTEDTAVYYCVRHGNFGNSYVSWWAYWGQGTLVTVSSGGGGSGGGGSGGGGSQTVVTQEPSLTVSPGGTVTLTCGSSTGAVTSGNYPNWVQQKPGQAPRGLIGGTKFLAPGTPARFSGSLLGGKAALTLSGVQPEDEAEYYCVLWYSNRWVFGGGTKLTVL

SEQ ID NO: 486 - DNA, 1515 bp, Artificial
  unknown organism
caggtgcagctggtgcagtctggagctgaggtgaagaagcctggagagtcagtcaaggtctcctgcaaggctagcgggtataccttcacaaactatggaatgaactgggtgaagcaggctccaggacagggtttagagtggatgggctggataaacacctacactggagagacaaactatgctgataagttccagggacgcgttaccttcacttcggatacctctaccagcactgcctatatggaactccgcaacctcaaaagtgatgacacggctgtatattactgtgcgcgctggagttggagtgatggttactacgtttactttgactactggggccaaggcactacggtcaccgtctcctcaggtggtggtggttctggcggcggcggctccggtggtggtggttctgacatcgtgatgacacagtctccagactccctgtctgtgtctctgggcgagaggaccaccatcaactgcaagtccagccagagtgttttagacagctccacgaataagaactccttagcttggtaccagcagaaaccaggacagcctcctaaattactcctttcctgggcatctacgcgggaatccgggatccctgaccgattcagtggcagcgggtctgggacagatttcactctcactattgacagcctgcagcctgaagattctgcaacttactattgtcaacagtctgcccacttcccgatcacctttggccaagggacacgactggagattaaatccggaggtggtggctccgaggtgcagctggtcgagtctggaggaggattggtgcagcctggagggtcattgaaactctcatgtgcagcctctggattcaccttcaatagctacgccatgaactgggtccgccaggctccaggaaagggtttggaatgggttgctcgcataagaagtaaatataataattatgcaacatattatgccgattcagtgaaaggcaggttcaccatctccagagatgattcaaaaaacactgcctatctacaaatgaacaacttgaaaactgaggacactgccgtgtactactgtgtgagacatgggaacttcggtaatagctacgtttcctggtgggcttactggggccaagggactctggtcaccgtctcctcaggtggtggtggttctggcggcggcggctccggtggtggtggttctcagactgttgtgactcaggaaccttcactcaccgtatcacctggtggaacagtcacactcacttgtggctcctcgactggggctgttacatctggcaactacccaaactgggtccaacaaaaaccaggtcaggcaccccgtggtctaataggtgggactaagttcctcgcccccggtactcctgccagattctcaggctccctgcttggaggcaaggctgccctcaccctctcaggggtacagccagaggatgaggcagaatattactgtgttctatggtacagcaaccgctgggtgttcggtggaggaaccaaactgactgtccta

SEQ ID NO: 487 - protein, 505 aa, Artificial
  unknown organism
QVQLVQSGAEVKKPGESVKVSCKASGYTFTNYGMNWVKQAPGQGLEWMGWINTYTGETNYADKFQGRVTFTSDTSTSTAYMELRNLKSDDTAVYYCARWSWSDGYYVYFDYWGQGTTVTVSSGGGGSGGGGSGGGGSDIVMTQSPDSLSVSLGERTTINCKSSQSVLDSSTNKNSLAWYQQKPGQPPKLLLSWASTRESGIPDRFSGSGSGTDFTLTIDSLQPEDSATYYCQQSAHFPITFGQGTRLEIKSGGGGSEVQLVESGGGLVQPGGSLKLSCAASGFTFNKYAMNWVRQAPGKGLEWVARIRSKYNNYATYYADSVKDRFTISRDDSKNTAYLQMNNLKTEDTAVYYCVRHGNFGNSYISYWAYWGQGTLVTVSSGGGGSGGGGSGGGGSQTVVTQEPSLTVSPGGTVTLTCGSSTGAVTSGNYPNWVQQKPGQAPRGLIGGTKFLAPGTPARFSGSLLGGKAALTLSGVQPEDEAEYYCVLWYSNRWVFGGGTKLTVL

SEQ ID NO: 488 - DNA, 1515 bp, Artificial
  unknown organism
caggtgcagctggtgcagtctggagctgaggtgaagaagcctggagagtcagtcaaggtctcctgcaaggctagcgggtataccttcacaaactatggaatgaactgggtgaagcaggctccaggacagggtttagagtggatgggctggataaacacctacactggagagacaaactatgctgataagttccagggacgcgttaccttcacttcggatacctctaccagcactgcctatatggaactccgcaacctcaaaagtgatgacacggctgtatattactgtgcgcgctggagttggagtgatggttactacgtttactttgactactggggccaaggcactacggtcaccgtctcctcaggtggtggtggttctggcggcggcggctccggtggtggtggttctgacatcgtgatgacacagtctccagactccctgtctgtgtctctgggcgagaggaccaccatcaactgcaagtccagccagagtgttttagacagctccacgaataagaactccttagcttggtaccagcagaaaccaggacagcctcctaaattactcctttcctgggcatctacgcgggaatccgggatccctgaccgattcagtggcagcgggtctgggacagatttcactctcactattgacagcctgcagcctgaagattctgcaacttactattgtcaacagtctgcccacttcccgatcacctttggccaagggacacgactggagattaaatccggaggtggtggctccgaggtgcagctggtcgagtctggaggaggattggtgcagcctggagggtcattgaaactctcatgtgcagcctctggattcaccttcaataagtacgccatgaactgggtccgccaggctccaggaaagggtttggaatgggttgctcgcataagaagtaaatataataattatgcaacatattatgccgattcagtgaaagacaggttcaccatctccagagatgattcaaaaaacactgcctatctacaaatgaacaacttgaaaactgaggacactgccgtgtactactgtgtgagacatgggaacttcggtaatagctacatatcctactgggcttactggggccaagggactctggtcaccgtctcctcaggtggtggtggttctggcggcggcggctccggtggtggtggttctcagactgttgtgactcaggaaccttcactcaccgtatcacctggtggaacagtcacactcacttgtggctcctcgactggggctgttacatctggcaactacccaaactgggtccaacaaaaaccaggtcaggcaccccgtggtctaataggtgggactaagttcctcgcccccggtactcctgccagattctcaggctccctgcttggaggcaaggctgccctcaccctctcaggggtacagccagaggatgaggcagaatattactgtgttctatggtacagcaaccgctgggtgttcggtggaggaaccaaactgactgtccta

SEQ ID NO: 489 - protein, 122 aa, Artificial
  unknown organism
QVQLVQSGAEVKKPGESVKVSCKASGYTFTNYGMNWVKQAPGQGLEWMGWINTYTGEPTYADKFQGRVTMTTDTSTSTAYMEIRNLRSDDTAVYYCARWSWSDGYYVYFDYWGQGTTVTVSS

SEQ ID NO: 490 - protein, 5 aa, Artificial
  unknown organism
NYGMN

SEQ ID NO: 491 - protein, 17 aa, Artificial
  unknown organism
WINTYTGEPTYADKFQG

SEQ ID NO: 492 - protein, 13 aa, Artificial
  unknown organism
WSWSDGYYVYFDY

SEQ ID NO: 493 - DNA, 366 bp, Artificial
  unknown organism
caggtgcagctggtgcagtctggagctgaggtgaagaagcctggtgagtcagtcaaggtctcctgcaaggctagcgggtataccttcacaaactatggaatgaactgggtgaagcaggctccaggacagggtttagagtggatgggctggataaacacctacactggagagccaacctatgctgataagttccagggacgcgttaccatgactacggatacctctaccagcactgcctatatggaaatccgcaacctcagaagtgatgacacggctgtatattactgtgcgcgctggagttggagtgatggttactacgtttactttgactactggggccaaggcactacggtcaccgtctcctca

SEQ ID NO: 494 - protein, 113 aa, Artificial
  unknown organism
DIVMTQSPDSLTVSLGERTTINCKSSQSVLDSSNNKNSLAWYQQKPGQPPKLLLSWASTRESGIPDRFSGSGSGTDFTLTIDGLQPEDSATYYCQQSAHFPITFGQGTRLEIK

SEQ ID NO: 495 - protein, 17 aa, Artificial
  unknown organism
KSSQSVLDSSNNKNSLA

SEQ ID NO: 496 - protein, 7 aa, Artificial
  unknown organism
WASTRES

SEQ ID NO: 497 - protein, 9 aa, Artificial
  unknown organism
QQSAHFPIT

SEQ ID NO: 498 - DNA, 339 bp, Artificial
  unknown organism
gacatcgtgatgacacagtctccagactccctgactgtgtctctgggcgagaggaccaccatcaactgcaagtccagccagagtgttttagacagctccaacaataagaactccttagcttggtaccagcagaaaccaggacagcctcctaaattactcctttcctgggcatctacgcgggaatccgggatccctgaccgattcagtggcagcggttctgggacagatttcactctcactattgacggcctgcagcctgaagattctgcaacttactattgtcaacagtctgcccacttcccgatcacctttggccaagggacacgactggagattaaa

SEQ ID NO: 499 - protein, 250 aa, Artificial
  unknown organism
QVQLVQSGAEVKKPGESVKVSCKASGYTFTNYGMNWVKQAPGQGLEWMGWINTYTGEPTYADKFQGRVTMTTDTSTSTAYMEIRNLRSDDTAVYYCARWSWSDGYYVYFDYWGQGTTVTVSSGGGGSGGGGSGGGGSDIVMTQSPDSLTVSLGERTTINCKSSQSVLDSSNNKNSLAWYQQKPGQPPKLLLSWASTRESGIPDRFSGSGSGTDFTLTIDGLQPEDSATYYCQQSAHFPITFGQGTRLEIK

SEQ ID NO: 500 - DNA, 750 bp, Artificial
  unknown organism
caggtgcagctggtgcagtctggagctgaggtgaagaagcctggtgagtcagtcaaggtctcctgcaaggctagcgggtataccttcacaaactatggaatgaactgggtgaagcaggctccaggacagggtttagagtggatgggctggataaacacctacactggagagccaacctatgctgataagttccagggacgcgttaccatgactacggatacctctaccagcactgcctatatggaaatccgcaacctcagaagtgatgacacggctgtatattactgtgcgcgctggagttggagtgatggttactacgtttactttgactactggggccaaggcactacggtcaccgtctcctcaggtggtggtggttctggcggcggcggctccggtggtggtggttctgacatcgtgatgacacagtctccagactccctgactgtgtctctgggcgagaggaccaccatcaactgcaagtccagccagagtgttttagacagctccaacaataagaactccttagcttggtaccagcagaaaccaggacagcctcctaaattactcctttcctgggcatctacgcgggaatccgggatccctgaccgattcagtggcagcggttctgggacagatttcactctcactattgacggcctgcagcctgaagattctgcaacttactattgtcaacagtctgcccacttcccgatcacctttggccaagggacacgactggagattaaa

SEQ ID NO: 501 - protein, 505 aa, Artificial
  unknown organism
QVQLVQSGAEVKKPGESVKVSCKASGYTFTNYGMNWVKQAPGQGLEWMGWINTYTGEPTYADKFQGRVTMTTDTSTSTAYMEIRNLRSDDTAVYYCARWSWSDGYYVYFDYWGQGTTVTVSSGGGGSGGGGSGGGGSDIVMTQSPDSLTVSLGERTTINCKSSQSVLDSSNNKNSLAWYQQKPGQPPKLLLSWASTRESGIPDRFSGSGSGTDFTLTIDGLQPEDSATYYCQQSAHFPITFGQGTRLEIKSGGGGSEVQLVESGGGLVQPGGSLKLSCAASGFTFNKYAMNWVRQAPGKGLEWVARIRSKYNNYATYYADSVKDRFTISRDDSKNTAYLQMNNLKTEDTAVYYCVRHGNFGNSYISYWAYWGQGTLVTVSSGGGGSGGGGSGGGGSQTVVTQEPSLTVSPGGTVTLTCGSSTGAVTSGYYPNWVQQKPGQAPRGLIGGTKFLAPGTPARFSGSLLGGKAALTLSGVQPEDEAEYYCALWYSNRWVFGGGTKLTVL

SEQ ID NO: 502 - DNA, 1515 bp, Artificial
  unknown organism
caggtgcagctggtgcagtctggagctgaggtgaagaagcctggtgagtcagtcaaggtctcctgcaaggctagcgggtataccttcacaaactatggaatgaactgggtgaagcaggctccaggacagggtttagagtggatgggctggataaacacctacactggagagccaacctatgctgataagttccagggacgcgttaccatgactacggatacctctaccagcactgcctatatggaaatccgcaacctcagaagtgatgacacggctgtatattactgtgcgcgctggagttggagtgatggttactacgtttactttgactactggggccaaggcactacggtcaccgtctcctcaggtggtggtggttctggcggcggcggctccggtggtggtggttctgacatcgtgatgacacagtctccagactccctgactgtgtctctgggcgagaggaccaccatcaactgcaagtccagccagagtgttttagacagctccaacaataagaactccttagcttggtaccagcagaaaccaggacagcctcctaaattactcctttcctgggcatctacgcgggaatccgggatccctgaccgattcagtggcagcggttctgggacagatttcactctcactattgacggcctgcagcctgaagattctgcaacttactattgtcaacagtctgcccacttcccgatcacctttggccaagggacacgactggagattaaatccggaggtggtggctccgaggtgcagctggtcgagtctggaggaggattggtgcagcctggagggtcattgaaactctcatgtgcagcctctggattcaccttcaataagtacgccatgaactgggtccgccaggctccaggaaagggtttggaatgggttgctcgcataagaagtaaatataataattatgcaacatattatgccgattcagtgaaagacaggttcaccatctccagagatgattcaaaaaacactgcctatctacaaatgaacaacttgaaaactgaggacactgccgtgtactactgtgtgagacatgggaacttcggtaatagctacatatcctactgggcttactggggccaagggactctggtcaccgtctcctcaggtggtggtggttctggcggcggcggctccggtggtggtggttctcagactgttgtgactcaggaaccttcactcaccgtatcacctggtggaacagtcacactcacttgtggctcctcgactggggctgttacatctggctactacccaaactgggtccaacaaaaaccaggtcaggcaccccgtggtctaataggtgggactaagttcctcgcccccggtactcctgccagattctcaggctccctgcttggaggcaaggctgccctcaccctctcaggggtacagccagaggatgaggcagaatattactgtgctctatggtacagcaaccgctgggtgttcggtggaggaaccaaactgactgtccta

SEQ ID NO: 503 - protein, 505 aa, Artificial
  unknown organism
QVQLVQSGAEVKKPGESVKVSCKASGYTFTNYGMNWVKQAPGQGLEWMGWINTYTGEPTYADKFQGRVTMTTDTSTSTAYMEIRNLRSDDTAVYYCARWSWSDGYYVYFDYWGQGTTVTVSSGGGGSGGGGSGGGGSDIVMTQSPDSLTVSLGERTTINCKSSQSVLDSSNNKNSLAWYQQKPGQPPKLLLSWASTRESGIPDRFSGSGSGTDFTLTIDGLQPEDSATYYCQQSAHFPITFGQGTRLEIKSGGGGSEVQLVESGGGLVQPGGSLKLSCAASGFTFNSYAMNWVRQAPGKGLEWVARIRSKYNNYATYYADSVKGRFTISRDDSKNTAYLQMNNLKTEDTAVYYCVRHGNFGNSYVSWWAYWGQGTLVTVSSGGGGSGGGGSGGGGSQTVVTQEPSLTVSPGGTVTLTCGSSTGAVTSGNYPNWVQQKPGQAPRGLIGGTKFLAPGTPARFSGSLLGGKAALTLSGVQPEDEAEYYCVLWYSNRWVFGGGTKLTVL

SEQ ID NO: 504 - DNA, 1515 bp, Artificial
  unknown organism
caggtgcagctggtgcagtctggagctgaggtgaagaagcctggtgagtcagtcaaggtctcctgcaaggctagcgggtataccttcacaaactatggaatgaactgggtgaagcaggctccaggacagggtttagagtggatgggctggataaacacctacactggagagccaacctatgctgataagttccagggacgcgttaccatgactacggatacctctaccagcactgcctatatggaaatccgcaacctcagaagtgatgacacggctgtatattactgtgcgcgctggagttggagtgatggttactacgtttactttgactactggggccaaggcactacggtcaccgtctcctcaggtggtggtggttctggcggcggcggctccggtggtggtggttctgacatcgtgatgacacagtctccagactccctgactgtgtctctgggcgagaggaccaccatcaactgcaagtccagccagagtgttttagacagctccaacaataagaactccttagcttggtaccagcagaaaccaggacagcctcctaaattactcctttcctgggcatctacgcgggaatccgggatccctgaccgattcagtggcagcggttctgggacagatttcactctcactattgacggcctgcagcctgaagattctgcaacttactattgtcaacagtctgcccacttcccgatcacctttggccaagggacacgactggagattaaatccggaggtggtggctccgaggtgcagctggtcgagtctggaggaggattggtgcagcctggagggtcattgaaactctcatgtgcagcctctggattcaccttcaatagctacgccatgaactgggtccgccaggctccaggaaagggtttggaatgggttgctcgcataagaagtaaatataataattatgcaacatattatgccgattcagtgaaaggcaggttcaccatctccagagatgattcaaaaaacactgcctatctacaaatgaacaacttgaaaactgaggacactgccgtgtactactgtgtgagacatgggaacttcggtaatagctacgtttcctggtgggcttactggggccaagggactctggtcaccgtctcctcaggtggtggtggttctggcggcggcggctccggtggtggtggttctcagactgttgtgactcaggaaccttcactcaccgtatcacctggtggaacagtcacactcacttgtggctcctcgactggggctgttacatctggcaactacccaaactgggtccaacaaaaaccaggtcaggcaccccgtggtctaataggtgggactaagttcctcgcccccggtactcctgccagattctcaggctccctgcttggaggcaaggctgccctcaccctctcaggggtacagccagaggatgaggcagaatattactgtgttctatggtacagcaaccgctgggtgttcggtggaggaaccaaactgactgtccta

SEQ ID NO: 505 - protein, 505 aa, Artificial
  unknown organism
QVQLVQSGAEVKKPGESVKVSCKASGYTFTNYGMNWVKQAPGQGLEWMGWINTYTGEPTYADKFQGRVTMTTDTSTSTAYMEIRNLRSDDTAVYYCARWSWSDGYYVYFDYWGQGTTVTVSSGGGGSGGGGSGGGGSDIVMTQSPDSLTVSLGERTTINCKSSQSVLDSSNNKNSLAWYQQKPGQPPKLLLSWASTRESGIPDRFSGSGSGTDFTLTIDGLQPEDSATYYCQQSAHFPITFGQGTRLEIKSGGGGSEVQLVESGGGLVQPGGSLKLSCAASGFTFNKYAMNWVRQAPGKGLEWVARIRSKYNNYATYYADSVKDRFTISRDDSKNTAYLQMNNLKTEDTAVYYCVRHGNFGNSYISYWAYWGQGTLVTVSSGGGGSGGGGSGGGGSQTVVTQEPSLTVSPGGTVTLTCGSSTGAVTSGNYPNWVQQKPGQAPRGLIGGTKFLAPGTPARFSGSLLGGKAALTLSGVQPEDEAEYYCVLWYSNRWVFGGGTKLTVL

SEQ ID NO: 506 - DNA, 1515 bp, Artificial
  unknown organism
caggtgcagctggtgcagtctggagctgaggtgaagaagcctggtgagtcagtcaaggtctcctgcaaggctagcgggtataccttcacaaactatggaatgaactgggtgaagcaggctccaggacagggtttagagtggatgggctggataaacacctacactggagagccaacctatgctgataagttccagggacgcgttaccatgactacggatacctctaccagcactgcctatatggaaatccgcaacctcagaagtgatgacacggctgtatattactgtgcgcgctggagttggagtgatggttactacgtttactttgactactggggccaaggcactacggtcaccgtctcctcaggtggtggtggttctggcggcggcggctccggtggtggtggttctgacatcgtgatgacacagtctccagactccctgactgtgtctctgggcgagaggaccaccatcaactgcaagtccagccagagtgttttagacagctccaacaataagaactccttagcttggtaccagcagaaaccaggacagcctcctaaattactcctttcctgggcatctacgcgggaatccgggatccctgaccgattcagtggcagcggttctgggacagatttcactctcactattgacggcctgcagcctgaagattctgcaacttactattgtcaacagtctgcccacttcccgatcacctttggccaagggacacgactggagattaaatccggaggtggtggctccgaggtgcagctggtcgagtctggaggaggattggtgcagcctggagggtcattgaaactctcatgtgcagcctctggattcaccttcaataagtacgccatgaactgggtccgccaggctccaggaaagggtttggaatgggttgctcgcataagaagtaaatataataattatgcaacatattatgccgattcagtgaaagacaggttcaccatctccagagatgattcaaaaaacactgcctatctacaaatgaacaacttgaaaactgaggacactgccgtgtactactgtgtgagacatgggaacttcggtaatagctacatatcctactgggcttactggggccaagggactctggtcaccgtctcctcaggtggtggtggttctggcggcggcggctccggtggtggtggttctcagactgttgtgactcaggaaccttcactcaccgtatcacctggtggaacagtcacactcacttgtggctcctcgactggggctgttacatctggcaactacccaaactgggtccaacaaaaaccaggtcaggcaccccgtggtctaataggtgggactaagttcctcgcccccggtactcctgccagattctcaggctccctgcttggaggcaaggctgccctcaccctctcaggggtacagccagaggatgaggcagaatattactgtgttctatggtacagcaaccgctgggtgttcggtggaggaaccaaactgactgtccta

SEQ ID NO: 507 - protein, 122 aa, Artificial
  unknown organism
QVQLVQSGAEVKKPGESVKVSCKASGYTFTNYGMNWVKQAPGQGLEWMGWINTYTGEPTYADKFQGRVTMTTDTSTSTAYMEIRNLGGDDTAVYYCARWSWSDGYYVYFDYWGQGTSVTVSS

SEQ ID NO: 508 - protein, 5 aa, Artificial
  unknown organism
NYGMN

SEQ ID NO: 509 - protein, 17 aa, Artificial
  unknown organism
WINTYTGEPTYADKFQG

SEQ ID NO: 510 - protein, 13 aa, Artificial
  unknown organism
WSWSDGYYVYFDY

SEQ ID NO: 511 - DNA, 366 bp, Artificial
  unknown organism
caggtgcagctggtgcagtctggagctgaggtgaagaagcctggagagtcagtcaaggtctcctgcaaggctagcgggtataccttcacaaactatggaatgaactgggtgaagcaggctccaggacagggtttagagtggatgggctggataaacacctacactggagagccaacctatgctgataagttccagggacgcgttaccatgactacggatacctctaccagcactgcctatatggaaatccgcaacctcggaggtgatgacacggctgtatattactgtgcgcgctggagttggagtgatggttactacgtttactttgactactggggccaaggcacttcggtcaccgtctcctca

SEQ ID NO: 512 - protein, 113 aa, Artificial
  unknown organism
DIVMTQSPDSLTVSLGERTTINCKSSQSVLDSSTNKNSLAWYQQKPGQPPKLLLSWASTRESGIPDRFSGSGSGTDFTLTIDSPQPEDSATYYCQQSAHFPITFGQGTRLEIK

SEQ ID NO: 513 - protein, 17 aa, Artificial
  unknown organism
KSSQSVLDSSTNKNSLA

SEQ ID NO: 514 - protein, 7 aa, Artificial
  unknown organism
WASTRES

SEQ ID NO: 515 - protein, 9 aa, Artificial
  unknown organism
QQSAHFPIT

SEQ ID NO: 516 - DNA, 339 bp, Artificial
  unknown organism
gacatcgtgatgacacagtctccagactccctgactgtgtctctgggcgagaggaccaccatcaactgcaagtccagccagagtgttttagacagctccacgaataagaactccttagcttggtaccagcagaaaccaggacagcctcctaaattactcctttcctgggcatctacgcgggaatccgggatccctgaccgattcagtggcagcgggtctgggacagatttcactctcactattgacagcccgcagcctgaagattctgcaacttactattgtcaacagtctgcccacttcccgatcacctttggccaagggacacgactggagattaaa

SEQ ID NO: 517 - protein, 250 aa, Artificial
  unknown organism
QVQLVQSGAEVKKPGESVKVSCKASGYTFTNYGMNWVKQAPGQGLEWMGWINTYTGEPTYADKFQGRVTMTTDTSTSTAYMEIRNLGGDDTAVYYCARWSWSDGYYVYFDYWGQGTSVTVSSGGGGSGGGGSGGGGSDIVMTQSPDSLTVSLGERTTINCKSSQSVLDSSTNKNSLAWYQQKPGQPPKLLLSWASTRESGIPDRFSGSGSGTDFTLTIDSPQPEDSATYYCQQSAHFPITFGQGTRLEIK

SEQ ID NO: 518 - DNA, 750 bp, Artificial
  unknown organism
caggtgcagctggtgcagtctggagctgaggtgaagaagcctggagagtcagtcaaggtctcctgcaaggctagcgggtataccttcacaaactatggaatgaactgggtgaagcaggctccaggacagggtttagagtggatgggctggataaacacctacactggagagccaacctatgctgataagttccagggacgcgttaccatgactacggatacctctaccagcactgcctatatggaaatccgcaacctcggaggtgatgacacggctgtatattactgtgcgcgctggagttggagtgatggttactacgtttactttgactactggggccaaggcacttcggtcaccgtctcctcaggtggtggtggttctggcggcggcggctccggtggtggtggttctgacatcgtgatgacacagtctccagactccctgactgtgtctctgggcgagaggaccaccatcaactgcaagtccagccagagtgttttagacagctccacgaataagaactccttagcttggtaccagcagaaaccaggacagcctcctaaattactcctttcctgggcatctacgcgggaatccgggatccctgaccgattcagtggcagcgggtctgggacagatttcactctcactattgacagcccgcagcctgaagattctgcaacttactattgtcaacagtctgcccacttcccgatcacctttggccaagggacacgactggagattaaa

SEQ ID NO: 519 - protein, 505 aa, Artificial
  unknown organism
QVQLVQSGAEVKKPGESVKVSCKASGYTFTNYGMNWVKQAPGQGLEWMGWINTYTGEPTYADKFQGRVTMTTDTSTSTAYMEIRNLGGDDTAVYYCARWSWSDGYYVYFDYWGQGTSVTVSSGGGGSGGGGSGGGGSDIVMTQSPDSLTVSLGERTTINCKSSQSVLDSSTNKNSLAWYQQKPGQPPKLLLSWASTRESGIPDRFSGSGSGTDFTLTIDSPQPEDSATYYCQQSAHFPITFGQGTRLEIKSGGGGSEVQLVESGGGLVQPGGSLKLSCAASGFTFNKYAMNWVRQAPGKGLEWVARIRSKYNNYATYYADSVKDRFTISRDDSKNTAYLQMNNLKTEDTAVYYCVRHGNFGNSYISYWAYWGQGTLVTVSSGGGGSGGGGSGGGGSQTVVTQEPSLTVSPGGTVTLTCGSSTGAVTSGYYPNWVQQKPGQAPRGLIGGTKFLAPGTPARFSGSLLGGKAALTLSGVQPEDEAEYYCALWYSNRWVFGGGTKLTVL

SEQ ID NO: 520 - DNA, 1515 bp, Artificial
  unknown organism
caggtgcagctggtgcagtctggagctgaggtgaagaagcctggagagtcagtcaaggtctcctgcaaggctagcgggtataccttcacaaactatggaatgaactgggtgaagcaggctccaggacagggtttagagtggatgggctggataaacacctacactggagagccaacctatgctgataagttccagggacgcgttaccatgactacggatacctctaccagcactgcctatatggaaatccgcaacctcggaggtgatgacacggctgtatattactgtgcgcgctggagttggagtgatggttactacgtttactttgactactggggccaaggcacttcggtcaccgtctcctcaggtggtggtggttctggcggcggcggctccggtggtggtggttctgacatcgtgatgacacagtctccagactccctgactgtgtctctgggcgagaggaccaccatcaactgcaagtccagccagagtgttttagacagctccacgaataagaactccttagcttggtaccagcagaaaccaggacagcctcctaaattactcctttcctgggcatctacgcgggaatccgggatccctgaccgattcagtggcagcgggtctgggacagatttcactctcactattgacagcccgcagcctgaagattctgcaacttactattgtcaacagtctgcccacttcccgatcacctttggccaagggacacgactggagattaaatccggaggtggtggctccgaggtgcagctggtcgagtctggaggaggattggtgcagcctggagggtcattgaaactctcatgtgcagcctctggattcaccttcaataagtacgccatgaactgggtccgccaggctccaggaaagggtttggaatgggttgctcgcataagaagtaaatataataattatgcaacatattatgccgattcagtgaaagacaggttcaccatctccagagatgattcaaaaaacactgcctatctacaaatgaacaacttgaaaactgaggacactgccgtgtactactgtgtgagacatgggaacttcggtaatagctacatatcctactgggcttactggggccaagggactctggtcaccgtctcctcaggtggtggtggttctggcggcggcggctccggtggtggtggttctcagactgttgtgactcaggaaccttcactcaccgtatcacctggtggaacagtcacactcacttgtggctcctcgactggggctgttacatctggctactacccaaactgggtccaacaaaaaccaggtcaggcaccccgtggtctaataggtgggactaagttcctcgcccccggtactcctgccagattctcaggctccctgcttggaggcaaggctgccctcaccctctcaggggtacagccagaggatgaggcagaatattactgtgctctatggtacagcaaccgctgggtgttcggtggaggaaccaaactgactgtccta

SEQ ID NO: 521 - protein, 505 aa, Artificial
  unknown organism
QVQLVQSGAEVKKPGESVKVSCKASGYTFTNYGMNWVKQAPGQGLEWMGWINTYTGEPTYADKFQGRVTMTTDTSTSTAYMEIRNLGGDDTAVYYCARWSWSDGYYVYFDYWGQGTSVTVSSGGGGSGGGGSGGGGSDIVMTQSPDSLTVSLGERTTINCKSSQSVLDSSTNKNSLAWYQQKPGQPPKLLLSWASTRESGIPDRFSGSGSGTDFTLTIDSPQPEDSATYYCQQSAHFPITFGQGTRLEIKSGGGGSEVQLVESGGGLVQPGGSLKLSCAASGFTFNSYAMNWVRQAPGKGLEWVARIRSKYNNYATYYADSVKGRFTISRDDSKNTAYLQMNNLKTEDTAVYYCVRHGNFGNSYVSWWAYWGQGTLVTVSSGGGGSGGGGSGGGGSQTVVTQEPSLTVSPGGTVTLTCGSSTGAVTSGNYPNWVQQKPGQAPRGLIGGTKFLAPGTPARFSGSLLGGKAALTLSGVQPEDEAEYYCVLWYSNRWVFGGGTKLTVL

SEQ ID NO: 522 - DNA, 1515 bp, Artificial
  unknown organism
caggtgcagctggtgcagtctggagctgaggtgaagaagcctggagagtcagtcaaggtctcctgcaaggctagcgggtataccttcacaaactatggaatgaactgggtgaagcaggctccaggacagggtttagagtggatgggctggataaacacctacactggagagccaacctatgctgataagttccagggacgcgttaccatgactacggatacctctaccagcactgcctatatggaaatccgcaacctcggaggtgatgacacggctgtatattactgtgcgcgctggagttggagtgatggttactacgtttactttgactactggggccaaggcacttcggtcaccgtctcctcaggtggtggtggttctggcggcggcggctccggtggtggtggttctgacatcgtgatgacacagtctccagactccctgactgtgtctctgggcgagaggaccaccatcaactgcaagtccagccagagtgttttagacagctccacgaataagaactccttagcttggtaccagcagaaaccaggacagcctcctaaattactcctttcctgggcatctacgcgggaatccgggatccctgaccgattcagtggcagcgggtctgggacagatttcactctcactattgacagcccgcagcctgaagattctgcaacttactattgtcaacagtctgcccacttcccgatcacctttggccaagggacacgactggagattaaatccggaggtggtggctccgaggtgcagctggtcgagtctggaggaggattggtgcagcctggagggtcattgaaactctcatgtgcagcctctggattcaccttcaatagctacgccatgaactgggtccgccaggctccaggaaagggtttggaatgggttgctcgcataagaagtaaatataataattatgcaacatattatgccgattcagtgaaaggcaggttcaccatctccagagatgattcaaaaaacactgcctatctacaaatgaacaacttgaaaactgaggacactgccgtgtactactgtgtgagacatgggaacttcggtaatagctacgtttcctggtgggcttactggggccaagggactctggtcaccgtctcctcaggtggtggtggttctggcggcggcggctccggtggtggtggttctcagactgttgtgactcaggaaccttcactcaccgtatcacctggtggaacagtcacactcacttgtggctcctcgactggggctgttacatctggcaactacccaaactgggtccaacaaaaaccaggtcaggcaccccgtggtctaataggtgggactaagttcctcgcccccggtactcctgccagattctcaggctccctgcttggaggcaaggctgccctcaccctctcaggggtacagccagaggatgaggcagaatattactgtgttctatggtacagcaaccgctgggtgttcggtggaggaaccaaactgactgtccta

SEQ ID NO: 523 - protein, 505 aa, Artificial
  unknown organism
QVQLVQSGAEVKKPGESVKVSCKASGYTFTNYGMNWVKQAPGQGLEWMGWINTYTGEPTYADKFQGRVTMTTDTSTSTAYMEIRNLGGDDTAVYYCARWSWSDGYYVYFDYWGQGTSVTVSSGGGGSGGGGSGGGGSDIVMTQSPDSLTVSLGERTTINCKSSQSVLDSSTNKNSLAWYQQKPGQPPKLLLSWASTRESGIPDRFSGSGSGTDFTLTIDSPQPEDSATYYCQQSAHFPITFGQGTRLEIKSGGGGSEVQLVESGGGLVQPGGSLKLSCAASGFTFNKYAMNWVRQAPGKGLEWVARIRSKYNNYATYYADSVKDRFTISRDDSKNTAYLQMNNLKTEDTAVYYCVRHGNFGNSYISYWAYWGQGTLVTVSSGGGGSGGGGSGGGGSQTVVTQEPSLTVSPGGTVTLTCGSSTGAVTSGNYPNWVQQKPGQAPRGLIGGTKFLAPGTPARFSGSLLGGKAALTLSGVQPEDEAEYYCVLWYSNRWVFGGGTKLTVL

SEQ ID NO: 524 - DNA, 1515 bp, Artificial
  unknown organism
caggtgcagctggtgcagtctggagctgaggtgaagaagcctggagagtcagtcaaggtctcctgcaaggctagcgggtataccttcacaaactatggaatgaactgggtgaagcaggctccaggacagggtttagagtggatgggctggataaacacctacactggagagccaacctatgctgataagttccagggacgcgttaccatgactacggatacctctaccagcactgcctatatggaaatccgcaacctcggaggtgatgacacggctgtatattactgtgcgcgctggagttggagtgatggttactacgtttactttgactactggggccaaggcacttcggtcaccgtctcctcaggtggtggtggttctggcggcggcggctccggtggtggtggttctgacatcgtgatgacacagtctccagactccctgactgtgtctctgggcgagaggaccaccatcaactgcaagtccagccagagtgttttagacagctccacgaataagaactccttagcttggtaccagcagaaaccaggacagcctcctaaattactcctttcctgggcatctacgcgggaatccgggatccctgaccgattcagtggcagcgggtctgggacagatttcactctcactattgacagcccgcagcctgaagattctgcaacttactattgtcaacagtctgcccacttcccgatcacctttggccaagggacacgactggagattaaatccggaggtggtggctccgaggtgcagctggtcgagtctggaggaggattggtgcagcctggagggtcattgaaactctcatgtgcagcctctggattcaccttcaataagtacgccatgaactgggtccgccaggctccaggaaagggtttggaatgggttgctcgcataagaagtaaatataataattatgcaacatattatgccgattcagtgaaagacaggttcaccatctccagagatgattcaaaaaacactgcctatctacaaatgaacaacttgaaaactgaggacactgccgtgtactactgtgtgagacatgggaacttcggtaatagctacatatcctactgggcttactggggccaagggactctggtcaccgtctcctcaggtggtggtggttctggcggcggcggctccggtggtggtggttctcagactgttgtgactcaggaaccttcactcaccgtatcacctggtggaacagtcacactcacttgtggctcctcgactggggctgttacatctggcaactacccaaactgggtccaacaaaaaccaggtcaggcaccccgtggtctaataggtgggactaagttcctcgcccccggtactcctgccagattctcaggctccctgcttggaggcaaggctgccctcaccctctcaggggtacagccagaggatgaggcagaatattactgtgttctatggtacagcaaccgctgggtgttcggtggaggaaccaaactgactgtccta

SEQ ID NO: 525 - DNA, 1125 bp, human
atgggatggagctgtatcatcctcttcttggtagcaacagctacaggtgtacactccgatccaaatttctggctgcaagtgcaggagtcagtgacggtacaggagggtttgtgcgtcctcgtgccctgcactttcttccatcccataccctactacgacaagaactccccagttcatggttactggttccgggaaggagccattatatccggggactctccagtggccacaaacaagctagatcaagaagtacaggaggagactcagggcagattccgcctccttggggatcccagtaggaacaactgctccctgagcatcgtagacgccaggaggagggataatggttcatacttctttcggatggagagaggaagtaccaaatacagttacaaatctccccagctctctgtgcatgtgacagacttgacccacaggcccaaaatcctcatccctggcactctagaacccggccactccaaaaacctgacctgctctgtgtcctgggcctgtgagcagggaacacccccgatcttctcctggttgtcagctgcccccacctccctgggccccaggactactcactcctcggtgctcataatcaccccacggccccaggaccacggcaccaacctgacctgtcaggtgaagttcgctggagctggtgtgactacggagagaaccatccagctcaacgtcacctatgttccacagaacccaacaactggtatctttccaggagatggctcagggaaacaagagaccagagcaggagtggttcatggggccattggaggagctggtgttacagccctgctcgctctttgtctctgcctcatcttcttcatagtgaagacccacaggaggaaagcagccaggacagcagtgggcaggaatgacacccaccctaccacagggtcagcctccccgaaacaccagaagaagtccaagttacatggccccactgaaacctcaagctgttcaggtgccgcccctactgtggagatggatgaggagctgcattatgcttccctcaactttcatgggatgaatccttccaaggacacctccaccgaatactcagaggtcaggacccagtccgggcatcatcaccatcatcattga

SEQ ID NO: 526 - protein, 374 aa, human
MGWSCIILFLVATATGVHSDPNFWLQVQESVTVQEGLCVLVPCTFFHPIPYYDKNSPVHGYWFREGAIISGDSPVATNKLDQEVQEETQGRFRLLGDPSRNNCSLSIVDARRRDNGSYFFRMERGSTKYSYKSPQLSVHVTDLTHRPKILIPGTLEPGHSKNLTCSVSWACEQGTPPIFSWLSAAPTSLGPRTTHSSVLIITPRPQDHGTNLTCQVKFAGAGVTTERTIQLNVTYVPQNPTTGIFPGDGSGKQETRAGVVHGAIGGAGVTALLALCLCLIFFIVKTHRRKAARTAVGRNDTHPTTGSASPKHQKKSKLHGPTETSSCSGAAPTVEMDEELHYASLNFHGMNPSKDTSTEYSEVRTQSGHHHHHH

SEQ ID NO: 527 - DNA, 1083 bp, macaque
atgccgctgctgctactgctgcccctgctgtgggcaggggccctggctatggatccaagagtcaggctggaagtgcaggagtcagtgacagtacaggagggtttgtgcgtccttgtgccctgcactttcttccatcccgtaccctaccacaccaggaattccccagttcatggttactggttccgggaaggagccattgtatccttggactctccagtggccacaaacaagctagatcaagaagtacaggaggagacccagggccgattccgcctccttggggatcccagtaggaacaactgctccctgagcatcgtagatgccaggaggagggataacggttcatacttctttcggatggagaaaggaagtaccaaatacagttacaaatctacccagctctctgtgcatgtgacagacttgacccacaggccccaaatcctcatccctggagccctagaccctgaccactccaaaaacctgacctgctctgtgccctgggcctgtgagcagggaacacctccaatcttctcctggatgtcagctgcccccacctccctgggcctcaggaccactcactcctcggtgctcataatcaccccacggccccaggaccacggcaccaacctcacctgtcaggtgaagttccctggagctggcgtgaccacggagagaaccatccagctcaatgtctcctatgcttcacagaacccaagaactgatatctttctaggagacggctcagggaaacaaggagtggttcagggagccatcgggggagctggtgtcacagtcctgctcgctctttgtctctgcctcatcttcttcacagtgaagactcacaggaggaaagcagccaggacagcagtgggcaggatcgacacccaccccgccacagggccaacatcctcgaaacaccagaagaagtccaagttacatggcgccactgaaacctcaggctgttcaggtaccacccttactgtggagatggatgaggagctgcactacgcttccctcaactttcatgggatgaatccttctgaggacacctccaccgaatactcagaggtcaggacccagtga

SEQ ID NO: 528 - protein, 360 aa, macaque
MPLLLLLPLLWAGALAMDPRVRLEVQESVTVQEGLCVLVPCTFFHPVPYHTRNSPVHGYWFREGAIVSLDSPVATNKLDQEVQEETQGRFRLLGDPSRNNCSLSIVDARRRDNGSYFFRMEKGSTKYSYKSTQLSVHVTDLTHRPQILIPGALDPDHSKNLTCSVPWACEQGTPPIFSWMSAAPTSLGLRTTHSSVLIITPRPQDHGTNLTCQVKFPGAGVTTERTIQLNVSYASQNPRTDIFLGDGSGKQGVVQGAIGGAGVTVLLALCLCLIFFTVKTHRRKAARTAVGRIDTHPATGPTSSKHQKKSKLHGATETSGCSGTTLTVEMDEELHYASLNFHGMNPSEDTSTEYSEVRTQ

SEQ ID NO: 529 - protein, 119 aa, Artificial
  unknown organism
QVQLVESGGGLVQPGGSLRLSCAASGFTFSSYSMSWVRQAPGKGLEWVSYISSSGSTIYYADSVKGRFTISRDNAKNSLYLQMNSLGAEDTAVYYCARHRSGRYALDYWGQGTTVTVSS

SEQ ID NO: 530 - protein, 5 aa, Artificial
  unknown organism
SYSMS

SEQ ID NO: 531 - protein, 17 aa, Artificial
  unknown organism
YISSSGSTIYYADSVKG

SEQ ID NO: 532 - protein, 10 aa, Artificial
  unknown organism
HRSGRYALDY

SEQ ID NO: 533 - DNA, 357 bp, Artificial
  unknown organism
caggtgcagctggtcgagtctgggggaggcttggtccagcctgggggttctctgagactctcatgtgcagcctctggattcaccttcagtagctatagcatgagctgggtccgccaggctccagggaaggggctggagtgggtttcatacattagtagtagtggtagtaccatatactacgcagactcagtgaagggccgattcaccatctccagagacaacgccaagaactcactgtatctgcaaatgaacagcctgggtgccgaggacacagccgtgtattactgtgctagacaccgctcggggcgctacgccctggactactggggccaagggaccacggtcaccgtctcctca

SEQ ID NO: 534 - protein, 107 aa, Artificial
  unknown organism
EIVMTQSPATLSVSPGERATLSCRASQSVSRGLAWYQQKPGQAPRLLIYSASTRATDIPAKFSGSGSGTEFTLTISSLQSEDVAVYYCQQYNKWPLTFGGGTKVDIK

SEQ ID NO: 535 - DNA, 321 bp, Artificial
  unknown organism
gagatcgtgatgacgcagtctccagccaccctgtctgtgtctccaggggaaagagccaccctctcctgcagggccagtcagagtgttagccgcggcttagcctggtaccagcagaagcctggccaggctcccaggctcctcatctatagtgcatccaccagggccactgatatcccagccaaattcagtggcagtgggtctgggacagagttcactctcaccatcagcagcctgcagtctgaagatgtcgcagtttattactgtcaacagtacaataagtggccgctcactttcggcggagggaccaaagtggatatcaaa

SEQ ID NO: 536 - protein, 241 aa, Artificial
  unknown organism
QVQLVESGGGLVQPGGSLRLSCAASGFTFSSYSMSWVRQAPGKGLEWVSYISSSGSTIYYADSVKGRFTISRDNAKNSLYLQMNSLGAEDTAVYYCARHRSGRYALDYWGQGTTVTVSSGGGGSGGGGSGGGGSEIVMTQSPATLSVSPGERATLSCRASQSVSRGLAWYQQKPGQAPRLLIYSASTRATDIPAKFSGSGSGTEFTLTISSLQSEDVAVYYCQQYNKWPLTFGGGTKVDIK

SEQ ID NO: 537 - DNA, 723 bp, Artificial
  unknown organism
caggtgcagctggtcgagtctgggggaggcttggtccagcctgggggttctctgagactctcatgtgcagcctctggattcaccttcagtagctatagcatgagctgggtccgccaggctccagggaaggggctggagtgggtttcatacattagtagtagtggtagtaccatatactacgcagactcagtgaagggccgattcaccatctccagagacaacgccaagaactcactgtatctgcaaatgaacagcctgggtgccgaggacacagccgtgtattactgtgctagacaccgctcggggcgctacgccctggactactggggccaagggaccacggtcaccgtctcctcaggtggtggtggttctggcggcggcggctccggtggtggtggttctgagatcgtgatgacgcagtctccagccaccctgtctgtgtctccaggggaaagagccaccctctcctgcagggccagtcagagtgttagccgcggcttagcctggtaccagcagaagcctggccaggctcccaggctcctcatctatagtgcatccaccagggccactgatatcccagccaaattcagtggcagtgggtctgggacagagttcactctcaccatcagcagcctgcagtctgaagatgtcgcagtttattactgtcaacagtacaataagtggccgctcactttcggcggagggaccaaagtggatatcaaa

SEQ ID NO: 538 - protein, 496 aa, Artificial
  unknown organism
QVQLVESGGGLVQPGGSLRLSCAASGFTFSSYSMSWVRQAPGKGLEWVSYISSSGSTIYYADSVKGRFTISRDNAKNSLYLQMNSLGAEDTAVYYCARHRSGRYALDYWGQGTTVTVSSGGGGSGGGGSGGGGSEIVMTQSPATLSVSPGERATLSCRASQSVSRGLAWYQQKPGQAPRLLIYSASTRATDIPAKFSGSGSGTEFTLTISSLQSEDVAVYYCQQYNKWPLTFGGGTKVDIKSGGGGSEVQLVESGGGLVQPGGSLKLSCAASGFTFNKYAMNWVRQAPGKGLEWVARIRSKYNNYATYYADSVKDRFTISRDDSKNTAYLQMNNLKTEDTAVYYCVRHGNFGNSYISYWAYWGQGTLVTVSSGGGGSGGGGSGGGGSQTVVTQEPSLTVSPGGTVTLTCGSSTGAVTSGYYPNWVQQKPGQAPRGLIGGTKFLAPGTPARFSGSLLGGKAALTLSGVQPEDEAEYYCALWYSNRWVFGGGTKLTVL

SEQ ID NO: 539 - DNA, 1488 bp, Artificial
  unknown organism
caggtgcagctggtcgagtctgggggaggcttggtccagcctgggggttctctgagactctcatgtgcagcctctggattcaccttcagtagctatagcatgagctgggtccgccaggctccagggaaggggctggagtgggtttcatacattagtagtagtggtagtaccatatactacgcagactcagtgaagggccgattcaccatctccagagacaacgccaagaactcactgtatctgcaaatgaacagcctgggtgccgaggacacagccgtgtattactgtgctagacaccgctcggggcgctacgccctggactactggggccaagggaccacggtcaccgtctcctcaggtggtggtggttctggcggcggcggctccggtggtggtggttctgagatcgtgatgacgcagtctccagccaccctgtctgtgtctccaggggaaagagccaccctctcctgcagggccagtcagagtgttagccgcggcttagcctggtaccagcagaagcctggccaggctcccaggctcctcatctatagtgcatccaccagggccactgatatcccagccaaattcagtggcagtgggtctgggacagagttcactctcaccatcagcagcctgcagtctgaagatgtcgcagtttattactgtcaacagtacaataagtggccgctcactttcggcggagggaccaaagtggatatcaaatccggaggtggtggatccgaggtgcagctggtcgagtctggaggaggattggtgcagcctggagggtcattgaaactctcatgtgcagcctctggattcaccttcaataagtacgccatgaactgggtccgccaggctccaggaaagggtttggaatgggttgctcgcataagaagtaaatataataattatgcaacatattatgccgattcagtgaaagacaggttcaccatctccagagatgattcaaaaaacactgcctatctacaaatgaacaacttgaaaactgaggacactgccgtgtactactgtgtgagacatgggaacttcggtaatagctacatatcctactgggcttactggggccaagggactctggtcaccgtctcctcaggtggtggtggttctggcggcggcggctccggtggtggtggttctcagactgttgtgactcaggaaccttcactcaccgtatcacctggtggaacagtcacactcacttgtggctcctcgactggggctgttacatctggctactacccaaactgggtccaacaaaaaccaggtcaggcaccccgtggtctaataggtgggactaagttcctcgcccccggtactcctgccagattctcaggctccctgcttggaggcaaggctgccctcaccctctcaggggtacagccagaggatgaggcagaatattactgtgctctatggtacagcaaccgctgggtgttcggtggaggaaccaaactgactgtccta

SEQ ID NO: 540 - protein, 496 aa, Artificial
  unknown organism
QVQLVESGGGLVQPGGSLRLSCAASGFTFSSYSMSWVRQAPGKGLEWVSYISSSGSTIYYADSVKGRFTISRDNAKNSLYLQMNSLGAEDTAVYYCARHRSGRYALDYWGQGTTVTVSSGGGGSGGGGSGGGGSEIVMTQSPATLSVSPGERATLSCRASQSVSRGLAWYQQKPGQAPRLLIYSASTRATDIPAKFSGSGSGTEFTLTISSLQSEDVAVYYCQQYNKWPLTFGGGTKVDIKSGGGGSEVQLVESGGGLVQPGGSLKLSCAASGFTFNSYAMNWVRQAPGKGLEWVARIRSKYNNYATYYADSVKGRFTISRDDSKNTAYLQMNNLKTEDTAVYYCVRHGNFGNSYVSWWAYWGQGTLVTVSSGGGGSGGGGSGGGGSQTVVTQEPSLTVSPGGTVTLTCGSSTGAVTSGNYPNWVQQKPGQAPRGLIGGTKFLAPGTPARFSGSLLGGKAALTLSGVQPEDEAEYYCVLWYSNRWVFGGGTKLTVL

SEQ ID NO: 541 - DNA, 1488 bp, Artificial
  unknown organism
caggtgcagctggtcgagtctgggggaggcttggtccagcctgggggttctctgagactctcatgtgcagcctctggattcaccttcagtagctatagcatgagctgggtccgccaggctccagggaaggggctggagtgggtttcatacattagtagtagtggtagtaccatatactacgcagactcagtgaagggccgattcaccatctccagagacaacgccaagaactcactgtatctgcaaatgaacagcctgggtgccgaggacacagccgtgtattactgtgctagacaccgctcggggcgctacgccctggactactggggccaagggaccacggtcaccgtctcctcaggtggtggtggttctggcggcggcggctccggtggtggtggttctgagatcgtgatgacgcagtctccagccaccctgtctgtgtctccaggggaaagagccaccctctcctgcagggccagtcagagtgttagccgcggcttagcctggtaccagcagaagcctggccaggctcccaggctcctcatctatagtgcatccaccagggccactgatatcccagccaaattcagtggcagtgggtctgggacagagttcactctcaccatcagcagcctgcagtctgaagatgtcgcagtttattactgtcaacagtacaataagtggccgctcactttcggcggagggaccaaagtggatatcaaatccggaggtggtggatccgaggtgcagctggtcgagtctggaggaggattggtgcagcctggagggtcattgaaactctcatgtgcagcctctggattcaccttcaatagctacgccatgaactgggtccgccaggctccaggaaagggtttggaatgggttgctcgcataagaagtaaatataataattatgcaacatattatgccgattcagtgaaaggcaggttcaccatctccagagatgattcaaaaaacactgcctatctacaaatgaacaacttgaaaactgaggacactgccgtgtactactgtgtgagacatgggaacttcggtaatagctacgtttcctggtgggcttactggggccaagggactctggtcaccgtctcctcaggtggtggtggttctggcggcggcggctccggtggtggtggttctcagactgttgtgactcaggaaccttcactcaccgtatcacctggtggaacagtcacactcacttgtggctcctcgactggggctgttacatctggcaactacccaaactgggtccaacaaaaaccaggtcaggcaccccgtggtctaataggtgggactaagttcctcgcccccggtactcctgccagattctcaggctccctgcttggaggcaaggctgccctcaccctctcaggggtacagccagaggatgaggcagaatattactgtgttctatggtacagcaaccgctgggtgttcggtggaggaaccaaactgactgtccta

SEQ ID NO: 542 - protein, 496 aa, Artificial
  unknown organism
QVQLVESGGGLVQPGGSLRLSCAASGFTFSSYSMSWVRQAPGKGLEWVSYISSSGSTIYYADSVKGRFTISRDNAKNSLYLQMNSLGAEDTAVYYCARHRSGRYALDYWGQGTTVTVSSGGGGSGGGGSGGGGSEIVMTQSPATLSVSPGERATLSCRASQSVSRGLAWYQQKPGQAPRLLIYSASTRATDIPAKFSGSGSGTEFTLTISSLQSEDVAVYYCQQYNKWPLTFGGGTKVDIKSGGGGSEVQLVESGGGLVQPGGSLKLSCAASGFTFNKYAMNWVRQAPGKGLEWVARIRSKYNNYATYYADSVKDRFTISRDDSKNTAYLQMNNLKTEDTAVYYCVRHGNFGNSYISYWAYWGQGTLVTVSSGGGGSGGGGSGGGGSQTVVTQEPSLTVSPGGTVTLTCGSSTGAVTSGNYPNWVQQKPGQAPRGLIGGTKFLAPGTPARFSGSLLGGKAALTLSGVQPEDEAEYYCVLWYSNRWVFGGGTKLTVL

SEQ ID NO: 543 - DNA, 1488 bp, Artificial
  unknown organism
caggtgcagctggtcgagtctgggggaggcttggtccagcctgggggttctctgagactctcatgtgcagcctctggattcaccttcagtagctatagcatgagctgggtccgccaggctccagggaaggggctggagtgggtttcatacattagtagtagtggtagtaccatatactacgcagactcagtgaagggccgattcaccatctccagagacaacgccaagaactcactgtatctgcaaatgaacagcctgggtgccgaggacacagccgtgtattactgtgctagacaccgctcggggcgctacgccctggactactggggccaagggaccacggtcaccgtctcctcaggtggtggtggttctggcggcggcggctccggtggtggtggttctgagatcgtgatgacgcagtctccagccaccctgtctgtgtctccaggggaaagagccaccctctcctgcagggccagtcagagtgttagccgcggcttagcctggtaccagcagaagcctggccaggctcccaggctcctcatctatagtgcatccaccagggccactgatatcccagccaaattcagtggcagtgggtctgggacagagttcactctcaccatcagcagcctgcagtctgaagatgtcgcagtttattactgtcaacagtacaataagtggccgctcactttcggcggagggaccaaagtggatatcaaatccggaggtggtggatccgaggtgcagctggtcgagtctggaggaggattggtgcagcctggagggtcattgaaactctcatgtgcagcctctggattcaccttcaataagtacgccatgaactgggtccgccaggctccaggaaagggtttggaatgggttgctcgcataagaagtaaatataataattatgcaacatattatgccgattcagtgaaagacaggttcaccatctccagagatgattcaaaaaacactgcctatctacaaatgaacaacttgaaaactgaggacactgccgtgtactactgtgtgagacatgggaacttcggtaatagctacatatcctactgggcttactggggccaagggactctggtcaccgtctcctcaggtggtggtggttctggcggcggcggctccggtggtggtggttctcagactgttgtgactcaggaaccttcactcaccgtatcacctggtggaacagtcacactcacttgtggctcctcgactggggctgttacatctggcaactacccaaactgggtccaacaaaaaccaggtcaggcaccccgtggtctaataggtgggactaagttcctcgcccccggtactcctgccagattctcaggctccctgcttggaggcaaggctgccctcaccctctcaggggtacagccagaggatgaggcagaatattactgtgttctatggtacagcaaccgctgggtgttcggtggaggaaccaaactgactgtccta

SEQ ID NO: 544 - protein, 119 aa, Artificial
  unknown organism
QVQLVESGGGLVQPGGSLRLSCAASGFTFSSYSMSWVRQAPGKGLEWVSYISSSGSTIYYADSVKGRFTISRDNAKNSLYLQMNSLGAEDTAVYYCARHRSYRFALDYWGQGTTVTVSS

SEQ ID NO: 545 - protein, 5 aa, Artificial
  unknown organism
SYSMS

SEQ ID NO: 546 - protein, 17 aa, Artificial
  unknown organism
YISSSGSTIYYADSVKG

SEQ ID NO: 547 - protein, 10 aa, Artificial
  unknown organism
HRSYRFALDY

SEQ ID NO: 548 - DNA, 357 bp, Artificial
  unknown organism
caggtgcagctggtcgagtctgggggaggcttggtccagcctgggggttctctgagactctcatgtgcagcctctggattcaccttcagtagctatagcatgagctgggtccgccaggctccagggaaggggctggagtgggtttcatacattagtagtagtggtagtaccatatactacgcagactcagtgaagggccgattcaccatctccagagacaacgccaagaactcactgtatctgcaaatgaacagcctgggagccgaggacacagccgtgtattactgtgctagacaccgctcgtaccgcttcgccctggactactggggccaagggaccacggtcaccgtctcctca

SEQ ID NO: 549 - protein, 107 aa, Artificial; identical to SEQ ID NO: 534
  unknown organism

SEQ ID NO: 550 - protein, 11 aa, Artificial
  unknown organism
RASQSVSRGLA

SEQ ID NO: 551 - protein, 7 aa, Artificial
  unknown organism
SASTRAT

SEQ ID NO: 552 - protein, 9 aa, Artificial
  unknown organism
QQYNKWPLT

SEQ ID NO: 553 - DNA, 321 bp, Artificial; identical to SEQ ID NO: 535
  unknown organism

SEQ ID NO: 554 - protein, 241 aa, Artificial
  unknown organism
QVQLVESGGGLVQPGGSLRLSCAASGFTFSSYSMSWVRQAPGKGLEWVSYISSSGSTIYYADSVKGRFTISRDNAKNSLYLQMNSLGAEDTAVYYCARHRSYRFALDYWGQGTTVTVSSGGGGSGGGGSGGGGSEIVMTQSPATLSVSPGERATLSCRASQSVSRGLAWYQQKPGQAPRLLIYSASTRATDIPAKFSGSGSGTEFTLTISSLQSEDVAVYYCQQYNKWPLTFGGGTKVDIK

SEQ ID NO: 555 - DNA, 723 bp, Artificial
  unknown organism
caggtgcagctggtcgagtctgggggaggcttggtccagcctgggggttctctgagactctcatgtgcagcctctggattcaccttcagtagctatagcatgagctgggtccgccaggctccagggaaggggctggagtgggtttcatacattagtagtagtggtagtaccatatactacgcagactcagtgaagggccgattcaccatctccagagacaacgccaagaactcactgtatctgcaaatgaacagcctgggagccgaggacacagccgtgtattactgtgctagacaccgctcgtaccgcttcgccctggactactggggccaagggaccacggtcaccgtctcctcaggtggtggtggttctggcggcggcggctccggtggtggtggttctgagatcgtgatgacgcagtctccagccaccctgtctgtgtctccaggggaaagagccaccctctcctgcagggccagtcagagtgttagccgcggcttagcctggtaccagcagaagcctggccaggctcccaggctcctcatctatagtgcatccaccagggccactgatatcccagccaaattcagtggcagtgggtctgggacagagttcactctcaccatcagcagcctgcagtctgaagatgtcgcagtttattactgtcaacagtacaataagtggccgctcactttcggcggagggaccaaagtggatatcaaa

SEQ ID NO: 556 - protein, 496 aa, Artificial
  unknown organism
QVQLVESGGGLVQPGGSLRLSCAASGFTFSSYSMSWVRQAPGKGLEWVSYISSSGSTIYYADSVKGRFTISRDNAKNSLYLQMNSLGAEDTAVYYCARHRSYRFALDYWGQGTTVTVSSGGGGSGGGGSGGGGSEIVMTQSPATLSVSPGERATLSCRASQSVSRGLAWYQQKPGQAPRLLIYSASTRATDIPAKFSGSGSGTEFTLTISSLQSEDVAVYYCQQYNKWPLTFGGGTKVDIKSGGGGSEVQLVESGGGLVQPGGSLKLSCAASGFTFNKYAMNWVRQAPGKGLEWVARIRSKYNNYATYYADSVKDRFTISRDDSKNTAYLQMNNLKTEDTAVYYCVRHGNFGNSYISYWAYWGQGTLVTVSSGGGGSGGGGSGGGGSQTVVTQEPSLTVSPGGTVTLTCGSSTGAVTSGNYPNWVQQKPGQAPRGLIGGTKFLAPGTPARFSGSLLGGKAALTLSGVQPEDEAEYYCVLWYSNRWVFGGGTKLTVL

SEQ ID NO: 557 - DNA, 1488 bp, Artificial
  unknown organism
caggtgcagctggtcgagtctgggggaggcttggtccagcctgggggttctctgagactctcatgtgcagcctctggattcaccttcagtagctatagcatgagctgggtccgccaggctccagggaaggggctggagtgggtttcatacattagtagtagtggtagtaccatatactacgcagactcagtgaagggccgattcaccatctccagagacaacgccaagaactcactgtatctgcaaatgaacagcctgggagccgaggacacagccgtgtattactgtgctagacaccgctcgtaccgcttcgccctggactactggggccaagggaccacggtcaccgtctcctcaggtggtggtggttctggcggcggcggctccggtggtggtggttctgagatcgtgatgacgcagtctccagccaccctgtctgtgtctccaggggaaagagccaccctctcctgcagggccagtcagagtgttagccgcggcttagcctggtaccagcagaagcctggccaggctcccaggctcctcatctatagtgcatccaccagggccactgatatcccagccaaattcagtggcagtgggtctgggacagagttcactctcaccatcagcagcctgcagtctgaagatgtcgcagtttattactgtcaacagtacaataagtggccgctcactttcggcggagggaccaaagtggatatcaaatccggaggtggtggatccgaggtgcagctggtcgagtctggaggaggattggtgcagcctggagggtcattgaaactctcatgtgcagcctctggattcaccttcaataagtacgccatgaactgggtccgccaggctccaggaaagggtttggaatgggttgctcgcataagaagtaaatataataattatgcaacatattatgccgattcagtgaaagacaggttcaccatctccagagatgattcaaaaaacactgcctatctacaaatgaacaacttgaaaactgaggacactgccgtgtactactgtgtgagacatgggaacttcggtaatagctacatatcctactgggcttactggggccaagggactctggtcaccgtctcctcaggtggtggtggttctggcggcggcggctccggtggtggtggttctcagactgttgtgactcaggaaccttcactcaccgtatcacctggtggaacagtcacactcacttgtggctcctcgactggggctgttacatctggcaactacccaaactgggtccaacaaaaaccaggtcaggcaccccgtggtctaataggtgggactaagttcctcgcccccggtactcctgccagattctcaggctccctgcttggaggcaaggctgccctcaccctctcaggggtacagccagaggatgaggcagaatattactgtgttctatggtacagcaaccgctgggtgttcggtggaggaaccaaactgactgtccta

SEQ ID NO: 558 - protein, 119 aa, Artificial
  unknown organism
QVQLVESGGGVVQPGRSLRLSCAASGFTFSSYAMSWVRQAPGKGLEWVAFIRYDGSNKYYADSVKGRFTISRDNSKNTLYLQMDSLRAEDTAVYYCARHKSSKFSMDYWGQGTTVTVSS

SEQ ID NO: 559 - protein, 5 aa, Artificial
  unknown organism
SYAMS

SEQ ID NO: 560 - protein, 17 aa, Artificial
  unknown organism
FIRYDGSNKYYADSVKG

SEQ ID NO: 561 - protein, 10 aa, Artificial
  unknown organism
HKSSKFSMDY

SEQ ID NO: 562 - DNA, 357 bp, Artificial
  unknown organism
caggtgcagctggtcgagtctgggggaggcgtggtccagcctgggaggtccctgagactctcctgtgcagcctctggattcacctttagcagctatgccatgagctgggtccgccaggctccaggcaaggggctggagtgggtggcatttatacggtatgatggaagtaataaatactatgcagactccgtgaagggccgattcaccatctccagagacaattccaagaacacgctgtatctgcaaatggacagcctgagagctgaggacacggccgtgtattactgtgctagacacaagtcctccaagttttctatggactactggggccaagggaccacggtcaccgtctcctca

SEQ ID NO: 563 - protein, 107 aa, Artificial; identical to SEQ ID NO: 534
  unknown organism

SEQ ID NO: 564 - protein, 11 aa, Artificial
  unknown organism
RASQSVSRGLA

SEQ ID NO: 565 - protein, 7 aa, Artificial
  unknown organism
SASTRAT

SEQ ID NO: 566 - protein, 9 aa, Artificial
  unknown organism
QQYNKWPLT

SEQ ID NO: 567 - DNA, 321 bp, Artificial; identical to SEQ ID NO: 535
  unknown organism

SEQ ID NO: 568 - protein, 241 aa, Artificial
  unknown organism
QVQLVESGGGVVQPGRSLRLSCAASGFTFSSYAMSWVRQAPGKGLEWVAFIRYDGSNKYYADSVKGRFTISRDNSKNTLYLQMDSLRAEDTAVYYCARHKSSKFSMDYWGQGTTVTVSSGGGGSGGGGSGGGGSEIVMTQSPATLSVSPGERATLSCRASQSVSRGLAWYQQKPGQAPRLLIYSASTRATDIPAKFSGSGSGTEFTLTISSLQSEDVAVYYCQQYNKWPLTFGGGTKVDIK

SEQ ID NO: 569 - DNA, 723 bp, Artificial
  unknown organism
caggtgcagctggtcgagtctgggggaggcgtggtccagcctgggaggtccctgagactctcctgtgcagcctctggattcacctttagcagctatgccatgagctgggtccgccaggctccaggcaaggggctggagtgggtggcatttatacggtatgatggaagtaataaatactatgcagactccgtgaagggccgattcaccatctccagagacaattccaagaacacgctgtatctgcaaatggacagcctgagagctgaggacacggccgtgtattactgtgctagacacaagtcctccaagttttctatggactactggggccaagggaccacggtcaccgtctcctcaggtggtggtggttctggcggcggcggctccggtggtggtggttctgagatcgtgatgacgcagtctccagccaccctgtctgtgtctccaggggaaagagccaccctctcctgcagggccagtcagagtgttagccgcggcttagcctggtaccagcagaagcctggccaggctcccaggctcctcatctatagtgcatccaccagggccactgatatcccagccaaattcagtggcagtgggtctgggacagagttcactctcaccatcagcagcctgcagtctgaagatgtcgcagtttattactgtcaacagtacaataagtggccgctcactttcggcggagggaccaaagtggatatcaaa

SEQ ID NO: 570 - protein, 496 aa, Artificial
  unknown organism
QVQLVESGGGVVQPGRSLRLSCAASGFTFSSYAMSWVRQAPGKGLEWVAFIRYDGSNKYYADSVKGRFTISRDNSKNTLYLQMDSLRAEDTAVYYCARHKSSKFSMDYWGQGTTVTVSSGGGGSGGGGSGGGGSEIVMTQSPATLSVSPGERATLSCRASQSVSRGLAWYQQKPGQAPRLLIYSASTRATDIPAKFSGSGSGTEFTLTISSLQSEDVAVYYCQQYNKWPLTFGGGTKVDIKSGGGGSEVQLVESGGGLVQPGGSLKLSCAASGFTFNKYAMNWVRQAPGKGLEWVARIRSKYNNYATYYADSVKDRFTISRDDSKNTAYLQMNNLKTEDTAVYYCVRHGNFGNSYISYWAYWGQGTLVTVSSGGGGSGGGGSGGGGSQTVVTQEPSLTVSPGGTVTLTCGSSTGAVTSGYYPNWVQQKPGQAPRGLIGGTKFLAPGTPARFSGSLLGGKAALTLSGVQPEDEAEYYCALWYSNRWVFGGGTKLTVL

SEQ ID NO: 571 - DNA, 1488 bp, Artificial
  unknown organism
caggtgcagctggtcgagtctgggggaggcgtggtccagcctgggaggtccctgagactctcctgtgcagcctctggattcacctttagcagctatgccatgagctgggtccgccaggctccaggcaaggggctggagtgggtggcatttatacggtatgatggaagtaataaatactatgcagactccgtgaagggccgattcaccatctccagagacaattccaagaacacgctgtatctgcaaatggacagcctgagagctgaggacacggccgtgtattactgtgctagacacaagtcctccaagttttctatggactactggggccaagggaccacggtcaccgtctcctcaggtggtggtggttctggcggcggcggctccggtggtggtggttctgagatcgtgatgacgcagtctccagccaccctgtctgtgtctccaggggaaagagccaccctctcctgcagggccagtcagagtgttagccgcggcttagcctggtaccagcagaagcctggccaggctcccaggctcctcatctatagtgcatccaccagggccactgatatcccagccaaattcagtggcagtgggtctgggacagagttcactctcaccatcagcagcctgcagtctgaagatgtcgcagtttattactgtcaacagtacaataagtggccgctcactttcggcggagggaccaaagtggatatcaaatccggaggtggtggatccgaggtgcagctggtcgagtctggaggaggattggtgcagcctggagggtcattgaaactctcatgtgcagcctctggattcaccttcaataagtacgccatgaactgggtccgccaggctccaggaaagggtttggaatgggttgctcgcataagaagtaaatataataattatgcaacatattatgccgattcagtgaaagacaggttcaccatctccagagatgattcaaaaaacactgcctatctacaaatgaacaacttgaaaactgaggacactgccgtgtactactgtgtgagacatgggaacttcggtaatagctacatatcctactgggcttactggggccaagggactctggtcaccgtctcctcaggtggtggtggttctggcggcggcggctccggtggtggtggttctcagactgttgtgactcaggaaccttcactcaccgtatcacctggtggaacagtcacactcacttgtggctcctcgactggggctgttacatctggctactacccaaactgggtccaacaaaaaccaggtcaggcaccccgtggtctaataggtgggactaagttcctcgcccccggtactcctgccagattctcaggctccctgcttggaggcaaggctgccctcaccctctcaggggtacagccagaggatgaggcagaatattactgtgctctatggtacagcaaccgctgggtgttcggtggaggaaccaaactgactgtccta

SEQ ID NO: 572 - protein, 496 aa, Artificial
  unknown organism
QVQLVESGGGVVQPGRSLRLSCAASGFTFSSYAMSWVRQAPGKGLEWVAFIRYDGSNKYYADSVKGRFTISRDNSKNTLYLQMDSLRAEDTAVYYCARHKSSKFSMDYWGQGTTVTVSSGGGGSGGGGSGGGGSEIVMTQSPATLSVSPGERATLSCRASQSVSRGLAWYQQKPGQAPRLLIYSASTRATDIPAKFSGSGSGTEFTLTISSLQSEDVAVYYCQQYNKWPLTFGGGTKVDIKSGGGGSEVQLVESGGGLVQPGGSLKLSCAASGFTFNSYAMNWVRQAPGKGLEWVARIRSKYNNYATYYADSVKGRFTISRDDSKNTAYLQMNNLKTEDTAVYYCVRHGNFGNSYVSWWAYWGQGTLVTVSSGGGGSGGGGSGGGGSQTVVTQEPSLTVSPGGTVTLTCGSSTGAVTSGNYPNWVQQKPGQAPRGLIGGTKFLAPGTPARFSGSLLGGKAALTLSGVQPEDEAEYYCVLWYSNRWVFGGGTKLTVL

SEQ ID NO: 573 - DNA, 1488 bp, Artificial
  unknown organism
caggtgcagctggtcgagtctgggggaggcgtggtccagcctgggaggtccctgagactctcctgtgcagcctctggattcacctttagcagctatgccatgagctgggtccgccaggctccaggcaaggggctggagtgggtggcatttatacggtatgatggaagtaataaatactatgcagactccgtgaagggccgattcaccatctccagagacaattccaagaacacgctgtatctgcaaatggacagcctgagagctgaggacacggccgtgtattactgtgctagacacaagtcctccaagttttctatggactactggggccaagggaccacggtcaccgtctcctcaggtggtggtggttctggcggcggcggctccggtggtggtggttctgagatcgtgatgacgcagtctccagccaccctgtctgtgtctccaggggaaagagccaccctctcctgcagggccagtcagagtgttagccgcggcttagcctggtaccagcagaagcctggccaggctcccaggctcctcatctatagtgcatccaccagggccactgatatcccagccaaattcagtggcagtgggtctgggacagagttcactctcaccatcagcagcctgcagtctgaagatgtcgcagtttattactgtcaacagtacaataagtggccgctcactttcggcggagggaccaaagtggatatcaaatccggaggtggtggatccgaggtgcagctggtcgagtctggaggaggattggtgcagcctggagggtcattgaaactctcatgtgcagcctctggattcaccttcaatagctacgccatgaactgggtccgccaggctccaggaaagggtttggaatgggttgctcgcataagaagtaaatataataattatgcaacatattatgccgattcagtgaaaggcaggttcaccatctccagagatgattcaaaaaacactgcctatctacaaatgaacaacttgaaaactgaggacactgccgtgtactactgtgtgagacatgggaacttcggtaatagctacgtttcctggtgggcttactggggccaagggactctggtcaccgtctcctcaggtggtggtggttctggcggcggcggctccggtggtggtggttctcagactgttgtgactcaggaaccttcactcaccgtatcacctggtggaacagtcacactcacttgtggctcctcgactggggctgttacatctggcaactacccaaactgggtccaacaaaaaccaggtcaggcaccccgtggtctaataggtgggactaagttcctcgcccccggtactcctgccagattctcaggctccctgcttggaggcaaggctgccctcaccctctcaggggtacagccagaggatgaggcagaatattactgtgttctatggtacagcaaccgctgggtgttcggtggaggaaccaaactgactgtccta

SEQ ID NO: 574 - protein, 496 aa, Artificial
  unknown organism
QVQLVESGGGVVQPGRSLRLSCAASGFTFSSYAMSWVRQAPGKGLEWVAFIRYDGSNKYYADSVKGRFTISRDNSKNTLYLQMDSLRAEDTAVYYCARHKSSKFSMDYWGQGTTVTVSSGGGGSGGGGSGGGGSEIVMTQSPATLSVSPGERATLSCRASQSVSRGLAWYQQKPGQAPRLLIYSASTRATDIPAKFSGSGSGTEFTLTISSLQSEDVAVYYCQQYNKWPLTFGGGTKVDIKSGGGGSEVQLVESGGGLVQPGGSLKLSCAASGFTFNKYAMNWVRQAPGKGLEWVARIRSKYNNYATYYADSVKDRFTISRDDSKNTAYLQMNNLKTEDTAVYYCVRHGNFGNSYISYWAYWGQGTLVTVSSGGGGSGGGGSGGGGSQTVVTQEPSLTVSPGGTVTLTCGSSTGAVTSGNYPNWVQQKPGQAPRGLIGGTKFLAPGTPARFSGSLLGGKAALTLSGVQPEDEAEYYCVLWYSNRWVFGGGTKLTVL

SEQ ID NO: 575 - DNA, 1488 bp, Artificial
  unknown organism
caggtgcagctggtcgagtctgggggaggcgtggtccagcctgggaggtccctgagactctcctgtgcagcctctggattcacctttagcagctatgccatgagctgggtccgccaggctccaggcaaggggctggagtgggtggcatttatacggtatgatggaagtaataaatactatgcagactccgtgaagggccgattcaccatctccagagacaattccaagaacacgctgtatctgcaaatggacagcctgagagctgaggacacggccgtgtattactgtgctagacacaagtcctccaagttttctatggactactggggccaagggaccacggtcaccgtctcctcaggtggtggtggttctggcggcggcggctccggtggtggtggttctgagatcgtgatgacgcagtctccagccaccctgtctgtgtctccaggggaaagagccaccctctcctgcagggccagtcagagtgttagccgcggcttagcctggtaccagcagaagcctggccaggctcccaggctcctcatctatagtgcatccaccagggccactgatatcccagccaaattcagtggcagtgggtctgggacagagttcactctcaccatcagcagcctgcagtctgaagatgtcgcagtttattactgtcaacagtacaataagtggccgctcactttcggcggagggaccaaagtggatatcaaatccggaggtggtggatccgaggtgcagctggtcgagtctggaggaggattggtgcagcctggagggtcattgaaactctcatgtgcagcctctggattcaccttcaataagtacgccatgaactgggtccgccaggctccaggaaagggtttggaatgggttgctcgcataagaagtaaatataataattatgcaacatattatgccgattcagtgaaagacaggttcaccatctccagagatgattcaaaaaacactgcctatctacaaatgaacaacttgaaaactgaggacactgccgtgtactactgtgtgagacatgggaacttcggtaatagctacatatcctactgggcttactggggccaagggactctggtcaccgtctcctcaggtggtggtggttctggcggcggcggctccggtggtggtggttctcagactgttgtgactcaggaaccttcactcaccgtatcacctggtggaacagtcacactcacttgtggctcctcgactggggctgttacatctggcaactacccaaactgggtccaacaaaaaccaggtcaggcaccccgtggtctaataggtgggactaagttcctcgcccccggtactcctgccagattctcaggctccctgcttggaggcaaggctgccctcaccctctcaggggtacagccagaggatgaggcagaatattactgtgttctatggtacagcaaccgctgggtgttcggtggaggaaccaaactgactgtccta

SEQ ID NO: 576 - protein, 127 aa, Artificial
  unknown organism
EVQLLESGGGVVQPGRSLRLSCAASGFTFSSYGMHWVRQAPGKGLEWVAVISYDGSNKYYADSVKGRFTISRDNSKNTLYLQMNSLRAEDTAVYYCAKDMGWGSGWRPYYYYGMDVWGQGTTVTVSS

SEQ ID NO: 577 - protein, 5 aa, Artificial
  unknown organism
SYGMH

SEQ ID NO: 578 - protein, 17 aa, Artificial
  unknown organism
VISYDGSNKYYADSVKG

SEQ ID NO: 579 - protein, 18 aa, Artificial
  unknown organism
DMGWGSGWRPYYYYGMDV

SEQ ID NO: 580 - DNA, 381 bp, Artificial
  unknown organism
gaggtgcagctgctcgagtctgggggaggcgtggtccagcctgggaggtccctgagactctcctgtgcagcctctggattcaccttcagtagctatggcatgcactgggtccgccaggctccaggcaaggggctggagtgggtggcagttatatcatatgatggaagtaataaatactatgcagactccgtgaagggccgattcaccatctccagagacaattccaagaacacgctgtatctgcaaatgaacagcctgagagctgaggacacggctgtgtattactgtgcgaaagatatggggtggggcagtggctggagaccctactactactacggtatggacgtctggggccaagggaccacggtcaccgtctcctca

SEQ ID NO: 581 - protein, 107 aa, Artificial
  unknown organism
ELQMTQSPSSLSASVGDRVTITCRTSQSISSYLNWYQQKPGQPPKLLIYWASTRESGVPDRFSGSGSGTDFTLTISSLQPEDSATYYCQQSYDIPYTFGQGTKLEIK

SEQ ID NO: 582 - protein, 11 aa, Artificial
  unknown organism
RTSQSISSYLN

SEQ ID NO: 583 - protein, 7 aa, Artificial
  unknown organism
WASTRES

SEQ ID NO: 584 - protein, 9 aa, Artificial
  unknown organism
QQSYDIPYT

SEQ ID NO: 585 - DNA, 321 bp, Artificial
  unknown organism
gagctccagatgacccagtctccatcctccctgtctgcttctgtgggagacagagtcaccatcacttgtcggacaagtcagagcattagcagctatttaaattggtatcagcagaaaccaggacagcctcctaagctgctcatttactgggcatctacccgggaatccggggtccctgaccgattcagtggcagcgggtctgggacagatttcactctcaccatcagcagtctacaacctgaagattctgcaacttactactgtcagcagagttacgacatcccgtacacttttggccaggggaccaagctggagatcaaa

SEQ ID NO: 586 - protein, 249 aa, Artificial
  unknown organism
EVQLLESGGGVVQPGRSLRLSCAASGFTFSSYGMHWVRQAPGKGLEWVAVISYDGSNKYYADSVKGRFTISRDNSKNTLYLQMNSLRAEDTAVYYCAKDMGWGSGWRPYYYYGMDVWGQGTTVTVSSGGGGSGGGGSGGGGSELQMTQSPSSLSASVGDRVTITCRTSQSISSYLNWYQQKPGQPPKLLIYWASTRESGVPDRFSGSGSGTDFTLTISSLQPEDSATYYCQQSYDIPYTFGQGTKLEIK

SEQ ID NO: 587 - DNA, 747 bp, Artificial
  unknown organism
gaggtgcagctgctcgagtctgggggaggcgtggtccagcctgggaggtccctgagactctcctgtgcagcctctggattcaccttcagtagctatggcatgcactgggtccgccaggctccaggcaaggggctggagtgggtggcagttatatcatatgatggaagtaataaatactatgcagactccgtgaagggccgattcaccatctccagagacaattccaagaacacgctgtatctgcaaatgaacagcctgagagctgaggacacggctgtgtattactgtgcgaaagatatggggtggggcagtggctggagaccctactactactacggtatggacgtctggggccaagggaccacggtcaccgtctcctcaggtggtggtggttctggcggcggcggctccggtggtggtggttctgagctccagatgacccagtctccatcctccctgtctgcttctgtgggagacagagtcaccatcacttgtcggacaagtcagagcattagcagctatttaaattggtatcagcagaaaccaggacagcctcctaagctgctcatttactgggcatctacccgggaatccggggtccctgaccgattcagtggcagcgggtctgggacagatttcactctcaccatcagcagtctacaacctgaagattctgcaacttactactgtcagcagagttacgacatcccgtacacttttggccaggggaccaagctggagatcaaa

SEQ ID NO: 588 - protein, 504 aa, Artificial
  unknown organism
EVQLLESGGGVVQPGRSLRLSCAASGFTFSSYGMHWVRQAPGKGLEWVAVISYDGSNKYYADSVKGRFTISRDNSKNTLYLQMNSLRAEDTAVYYCAKDMGWGSGWRPYYYYGMDVWGQGTTVTVSSGGGGSGGGGSGGGGSELQMTQSPSSLSASVGDRVTITCRTSQSISSYLNWYQQKPGQPPKLLIYWASTRESGVPDRFSGSGSGTDFTLTISSLQPEDSATYYCQQSYDIPYTFGQGTKLEIKSGGGGSEVQLVESGGGLVQPGGSLKLSCAASGFTFNKYAMNWVRQAPGKGLEWVARIRSKYNNYATYYADSVKDRFTISRDDSKNTAYLQMNNLKTEDTAVYYCVRHGNFGNSYISYWAYWGQGTLVTVSSGGGGSGGGGSGGGGSQTVVTQEPSLTVSPGGTVTLTCGSSTGAVTSGYYPNWVQQKPGQAPRGLIGGTKFLAPGTPARFSGSLLGGKAALTLSGVQPEDEAEYYCALWYSNRWVFGGGTKLTVL

SEQ ID NO: 589 - DNA, 1512 bp, Artificial
  unknown organism
gaggtgcagctgctcgagtctgggggaggcgtggtccagcctgggaggtccctgagactctcctgtgcagcctctggattcaccttcagtagctatggcatgcactgggtccgccaggctccaggcaaggggctggagtgggtggcagttatatcatatgatggaagtaataaatactatgcagactccgtgaagggccgattcaccatctccagagacaattccaagaacacgctgtatctgcaaatgaacagcctgagagctgaggacacggctgtgtattactgtgcgaaagatatggggtggggcagtggctggagaccctactactactacggtatggacgtctggggccaagggaccacggtcaccgtctcctcaggtggtggtggttctggcggcggcggctccggtggtggtggttctgagctccagatgacccagtctccatcctccctgtctgcttctgtgggagacagagtcaccatcacttgtcggacaagtcagagcattagcagctatttaaattggtatcagcagaaaccaggacagcctcctaagctgctcatttactgggcatctacccgggaatccggggtccctgaccgattcagtggcagcgggtctgggacagatttcactctcaccatcagcagtctacaacctgaagattctgcaacttactactgtcagcagagttacgacatcccgtacacttttggccaggggaccaagctggagatcaaatccggaggtggtggatccgaggtgcagctggtcgagtctggaggaggattggtgcagcctggagggtcattgaaactctcatgtgcagcctctggattcaccttcaataagtacgccatgaactgggtccgccaggctccaggaaagggtttggaatgggttgctcgcataagaagtaaatataataattatgcaacatattatgccgattcagtgaaagacaggttcaccatctccagagatgattcaaaaaacactgcctatctacaaatgaacaacttgaaaactgaggacactgccgtgtactactgtgtgagacatgggaacttcggtaatagctacatatcctactgggcttactggggccaagggactctggtcaccgtctcctcaggtggtggtggttctggcggcggcggctccggtggtggtggttctcagactgttgtgactcaggaaccttcactcaccgtatcacctggtggaacagtcacactcacttgtggctcctcgactggggctgttacatctggctactacccaaactgggtccaacaaaaaccaggtcaggcaccccgtggtctaataggtgggactaagttcctcgcccccggtactcctgccagattctcaggctccctgcttggaggcaaggctgccctcaccctctcaggggtacagccagaggatgaggcagaatattactgtgctctatggtacagcaaccgctgggtgttcggtggaggaaccaaactgactgtccta

SEQ ID NO: 590 - protein, 504 aa, Artificial
  unknown organism
EVQLLESGGGVVQPGRSLRLSCAASGFTFSSYGMHWVRQAPGKGLEWVAVISYDGSNKYYADSVKGRFTISRDNSKNTLYLQMNSLRAEDTAVYYCAKDMGWGSGWRPYYYYGMDVWGQGTTVTVSSGGGGSGGGGSGGGGSELQMTQSPSSLSASVGDRVTITCRTSQSISSYLNWYQQKPGQPPKLLIYWASTRESGVPDRFSGSGSGTDFTLTISSLQPEDSATYYCQQSYDIPYTFGQGTKLEIKSGGGGSEVQLVESGGGLVQPGGSLKLSCAASGFTFNSYAMNWVRQAPGKGLEWVARIRSKYNNYATYYADSVKGRFTISRDDSKNTAYLQMNNLKTEDTAVYYCVRHGNFGNSYVSWWAYWGQGTLVTVSSGGGGSGGGGSGGGGSQTVVTQEPSLTVSPGGTVTLTCGSSTGAVTSGNYPNWVQQKPGQAPRGLIGGTKFLAPGTPARFSGSLLGGKAALTLSGVQPEDEAEYYCVLWYSNRWVFGGGTKLTVL

SEQ ID NO: 591 - DNA, 1512 bp, Artificial
  unknown organism
gaggtgcagctgctcgagtctgggggaggcgtggtccagcctgggaggtccctgagactctcctgtgcagcctctggattcaccttcagtagctatggcatgcactgggtccgccaggctccaggcaaggggctggagtgggtggcagttatatcatatgatggaagtaataaatactatgcagactccgtgaagggccgattcaccatctccagagacaattccaagaacacgctgtatctgcaaatgaacagcctgagagctgaggacacggctgtgtattactgtgcgaaagatatggggtggggcagtggctggagaccctactactactacggtatggacgtctggggccaagggaccacggtcaccgtctcctcaggtggtggtggttctggcggcggcggctccggtggtggtggttctgagctccagatgacccagtctccatcctccctgtctgcttctgtgggagacagagtcaccatcacttgtcggacaagtcagagcattagcagctatttaaattggtatcagcagaaaccaggacagcctcctaagctgctcatttactgggcatctacccgggaatccggggtccctgaccgattcagtggcagcgggtctgggacagatttcactctcaccatcagcagtctacaacctgaagattctgcaacttactactgtcagcagagttacgacatcccgtacacttttggccaggggaccaagctggagatcaaatccggaggtggtggatccgaggtgcagctggtcgagtctggaggaggattggtgcagcctggagggtcattgaaactctcatgtgcagcctctggattcaccttcaatagctacgccatgaactgggtccgccaggctccaggaaagggtttggaatgggttgctcgcataagaagtaaatataataattatgcaacatattatgccgattcagtgaaaggcaggttcaccatctccagagatgattcaaaaaacactgcctatctacaaatgaacaacttgaaaactgaggacactgccgtgtactactgtgtgagacatgggaacttcggtaatagctacgtttcctggtgggcttactggggccaagggactctggtcaccgtctcctcaggtggtggtggttctggcggcggcggctccggtggtggtggttctcagactgttgtgactcaggaaccttcactcaccgtatcacctggtggaacagtcacactcacttgtggctcctcgactggggctgttacatctggcaactacccaaactgggtccaacaaaaaccaggtcaggcaccccgtggtctaataggtgggactaagttcctcgcccccggtactcctgccagattctcaggctccctgcttggaggcaaggctgccctcaccctctcaggggtacagccagaggatgaggcagaatattactgtgttctatggtacagcaaccgctgggtgttcggtggaggaaccaaactgactgtccta

SEQ ID NO: 592 - protein, 504 aa, Artificial
  unknown organism
EVQLLESGGGVVQPGRSLRLSCAASGFTFSSYGMHWVRQAPGKGLEWVAVISYDGSNKYYADSVKGRFTISRDNSKNTLYLQMNSLRAEDTAVYYCAKDMGWGSGWRPYYYYGMDVWGQGTTVTVSSGGGGSGGGGSGGGGSELQMTQSPSSLSASVGDRVTITCRTSQSISSYLNWYQQKPGQPPKLLIYWASTRESGVPDRFSGSGSGTDFTLTISSLQPEDSATYYCQQSYDIPYTFGQGTKLEIKSGGGGSEVQLVESGGGLVQPGGSLKLSCAASGFTFNKYAMNWVRQAPGKGLEWVARIRSKYNNYATYYADSVKDRFTISRDDSKNTAYLQMNNLKTEDTAVYYCVRHGNFGNSYISYWAYWGQGTLVTVSSGGGGSGGGGSGGGGSQTVVTQEPSLTVSPGGTVTLTCGSSTGAVTSGNYPNWVQQKPGQAPRGLIGGTKFLAPGTPARFSGSLLGGKAALTLSGVQPEDEAEYYCVLWYSNRWVFGGGTKLTVL

SEQ ID NO: 593 - DNA, 1512 bp, Artificial
  unknown organism
gaggtgcagctgctcgagtctgggggaggcgtggtccagcctgggaggtccctgagactctcctgtgcagcctctggattcaccttcagtagctatggcatgcactgggtccgccaggctccaggcaaggggctggagtgggtggcagttatatcatatgatggaagtaataaatactatgcagactccgtgaagggccgattcaccatctccagagacaattccaagaacacgctgtatctgcaaatgaacagcctgagagctgaggacacggctgtgtattactgtgcgaaagatatggggtggggcagtggctggagaccctactactactacggtatggacgtctggggccaagggaccacggtcaccgtctcctcaggtggtggtggttctggcggcggcggctccggtggtggtggttctgagctccagatgacccagtctccatcctccctgtctgcttctgtgggagacagagtcaccatcacttgtcggacaagtcagagcattagcagctatttaaattggtatcagcagaaaccaggacagcctcctaagctgctcatttactgggcatctacccgggaatccggggtccctgaccgattcagtggcagcgggtctgggacagatttcactctcaccatcagcagtctacaacctgaagattctgcaacttactactgtcagcagagttacgacatcccgtacacttttggccaggggaccaagctggagatcaaatccggaggtggtggatccgaggtgcagctggtcgagtctggaggaggattggtgcagcctggagggtcattgaaactctcatgtgcagcctctggattcaccttcaataagtacgccatgaactgggtccgccaggctccaggaaagggtttggaatgggttgctcgcataagaagtaaatataataattatgcaacatattatgccgattcagtgaaagacaggttcaccatctccagagatgattcaaaaaacactgcctatctacaaatgaacaacttgaaaactgaggacactgccgtgtactactgtgtgagacatgggaacttcggtaatagctacatatcctactgggcttactggggccaagggactctggtcaccgtctcctcaggtggtggtggttctggcggcggcggctccggtggtggtggttctcagactgttgtgactcaggaaccttcactcaccgtatcacctggtggaacagtcacactcacttgtggctcctcgactggggctgttacatctggcaactacccaaactgggtccaacaaaaaccaggtcaggcaccccgtggtctaataggtgggactaagttcctcgcccccggtactcctgccagattctcaggctccctgcttggaggcaaggctgccctcaccctctcaggggtacagccagaggatgaggcagaatattactgtgttctatggtacagcaaccgctgggtgttcggtggaggaaccaaactgactgtccta

SEQ ID NO: 594 - DNA, 2261 bp, rhesus
gaattccaccatgggatggagctgtatcatcctcttcttggtagcaacagctacaggtaaggggctcacagtagcaggcttgaggtctggacatatatatgggtgacaatgacatccactttgcctttctctccttagggtgtacactcccaggtccaactgcaccagcctggggctgagcttgtgaagcctggggcttcagtgaagctgtcctgcaaggcttctggctacaccttcaccagctactggatgcactgggtgaagcagaggcctggacgaggccttgagtggattggaaggattgatcctaatagtggtggtactaagtacaatgagaagttcaagagcaaggccacactgactgtagacaaaccctccagcacagcctacatgcagctcagcagcctgacatctgaggactctgcggtctattattgtgcaagatacgattactacggtagtagctactttgactactggggccaaggcaccactctcacagtctcctcaggtgagtccttacaacctctctcttctattcagcttaaatagattttactgcatttgttgggggggaaatgtgtgtatctgaatttcaggtcatgaaggactagggacaccttgggagtcagaaagggtcattgggagccctggctgatgcagacagacatcctcagctcccagacttcatggccagagatttatagggatccactagttctagatgtcccacaccgcggtcacatggcaccacctctcttgcagcctccatacagagcccattcgtcttccccttgatcccctgctgcaaacacattgcctccaatgccacctccgtgactctgggctgcctggccacgggctacttcccggagccggtgatggtcacttgggacgcaggctccctcaaccggtcaactatgaccttaccagccaccaccttcacgccctctggtcactatgccaccatcagcttgctgaccgtctcgggtgcgtgggccaaggagactttcacctgccatgtggtacacactccatcgtccgcagacaaggaggttaacaaaaccttcggcgtctgctccaggaacttcaccccgcccaccgtgaagatcttacagtcgtcctgcgacgatgacgggcacttccccccgaccatccagctcctgtgcctcatctctgggtacaccccaggggctatcaacgtcacctggctggagaacgggcaggtcatgaaagtgaactcgcccaccccccctgcaacgcaggagggtgagctggcctccacacaaagcgagtttaccctcgctcagaagcagtggctgacagaccgcaactacacctgccaagtcacctatcaaggtaccacctataacgacagcaccaagaagtgtgcagattccaacccgagaggggtgagcgcctacctaagccggcccagcccgttcgacctgttcatcagcaagtcgcccacgatcacctgtctggtggtggacctggcacccagcaaggagaccgtgaacctgacctggtcccgggccagtgggaagcctgtgccccacatccccacaacggagaagaagcagcgcaatggcacgttaaccgtcacgtccatcctgccggtagtcacccaagactggatcgagggggagacctaccagtgcagagtcacccacccccacctgcccagggccctcgtgcggtccatgaccaagaccagcggcccgcgtgctgccccggaagtctatgtgtttgcgacgccggagaagctggagagccgggacaagcgcaccctcgcctgcctgatccagaacttcatgcctgaagacatctcggtgcagtggctgcacagcgatgtgcagctcccggacgcccggcacagcgtgacgcagccccgcaagaccaagggctccggcttcttcgtcttcagccgcctggaagtgaccaaggccgaatgggagcagaaagatgagttcatctgccgtgcagtccatgaggcagcgagcccctcatggatcgtccagcaagcggtgtctgtaaatcccgagctggacgtgtgcgtggaggaggccgagggcgaggcgccgtggacgtggaccggcctctgcatcttcgccgcactcttcctgctcagcgtgagctacagcgccgccctcacgctcctcatggtgcagcggttcctctcagccacgcggcaggggaggccccagacctccctcgactacaccaacgtcctccagccccacgcctagtctagagtcgac

SEQ ID NO: 595 - DNA, 2677 bp, human
gaattccaccatgggatggagctgtatcatcctcttcttggtagcaacagctacaggtaaggggctcacagtagcaggcttgaggtctggacatatatatgggtgacaatgacatccactttgcctttctctccttagggtgtacactcccaggtccaactgcaccagcctggggctgagcttgtgaagcctggggcttcagtgaagctgtcctgcaaggcttctggctacaccttcaccagctactggatgcactgggtgaagcagaggcctggacgaggccttgagtggattggaaggattgatcctaatagtggtggtactaagtacaatgagaagttcaagagcaaggccacactgactgtagacaaaccctccagcacagcctacatgcagctcagcagcctgacatctgaggactctgcggtctattattgtgcaagatacgattactacggtagtagctactttgactactggggccaaggcaccactctcacagtctcctcaggtgagtccttacaacctctctcttctattcagcttaaatagattttactgcatttgttgggggggaaatgtgtgtatctgaatttcaggtcatgaaggactagggacaccttgggagtcagaaagggtcattgggagccctggctgatgcagacagacatcctcagctcccagacttcatggccagagatttataggggatccctgccacggggtccccagctcccccatccaggccccccaggctgatgggcgctggcctgaggctggcactgactaggttctgtcctcacagcctccacacagagcccatccgtcttccccttgacccgctgctgcaaaaacattccctccaatgccacctccgtgactctgggctgcctggccacgggctacttcccggagccggtgatggtgacctgggacacaggctccctcaacgggacaactatgaccttaccagccaccaccctcacgctctctggtcactatgccaccatcagcttgctgaccgtctcgggtgcgtgggccaagcagatgttcacctgccgtgtggcacacactccatcgtccacagactgggtcgacaacaaaaccttcagcggtaagagagggccaagctcagagaccacagttcccaggagtgccaggctgagggctggcagagtgggcaggggttgagggggtgggtgggctcaaacgtgggaacacccagcatgcctggggacccgggccaggacgtgggggcaagaggagggcacacagagctcagagaggccaacaaccctcatgaccaccagctctcccccagtctgctccagggacttcaccccgcccaccgtgaagatcttacagtcgtcctgcgacggcggcgggcacttccccccgaccatccagctcctgtgcctcgtctctgggtacaccccagggactatcaacatcacctggctggaggacgggcaggtcatggacgtggacttgtccaccgcctctaccacgcaggagggtgagctggcctccacacaaagcgagctcaccctcagccagaagcactggctgtcagaccgcacctacacctgccaggtcacctatcaaggtcacacctttgaggacagcaccaagaagtgtgcaggtacgttcccacctgccctggtggccgccacggaggccagagaagaggggcgggtgggcctcacacagccctccggtgtaccacagattccaacccgagaggggtgagcgcctacctaagccggcccagcccgttcgacctgttcatccgcaagtcgcccacgatcacctgtctggtggtggacctggcacccagcaaggggaccgtgaacctgacctggtcccgggccagtgggaagcctgtgaaccactccaccagaaaggaggagaagcagcgcaatggcacgttaaccgtcacgtccaccctgccggtgggcacccgagactggatcgagggggagacctaccagtgcagggtgacccacccccacctgcccagggccctcatgcggtccacgaccaagaccagcggtgagccatgggcaggccggggtcgtgggggaagggagggagcgagtgagcggggcccgggctgaccccacgtctggccacaggcccgcgtgctgccccggaagtctatgcgtttgcgacgccggagtggccggggagccgggacaagcgcaccctcgcctgcctgatccagaacttcatgcctgaggacatctcggtgcagtggctgcacaacgaggtgcagctcccggacgcccggcacagcacgacgcagccccgcaagaccaagggctccggcttcttcgtcttcagccgcctggaggtgaccagggccgaatgggagcagaaagatgagttcatctgccgtgcagtccatgaggcagcgagcccctcacagaccgtccagcgagcggtgtctgtaaatcccgagctggacgtgtgcgtggaggaggccgagggcgaggcgccgtggacgtggaccggcctctgcatcttcgccgcactcttcctgctcagcgtgagctacagcgccgccctcacgctcctcatggtgcagcggttcctctcagccacgcggcaggggaggccccagacctccctcgactacaccaacgtcctccagccccacgcctagtctagagtcgac

SEQ ID NO: 596 - protein, 1186 aa, human; identical to SEQ ID NO: 369

SEQ ID NO: 597 - DNA, 3651 bp, human
tctagagccaccatgcgaccctccgggacggccggggcagcgctcctggcgctgctggctgcgctctgcccggcgagtcgggctctggaggaaaagaaagtttgccaaggcacgagtaacaagctcacgcagttgggcacttttgaagatcattttctcagcctccagaggatgttcaataactgtgaggtggtccttgggaatttggaaattacctatgtgcagaggaattatgatctttccttcttaaagaccatccaggaggtggctggttatgtcctcattgccctcaacacagtggagcgaattcctttggaaaacctgcagatcatcagaggaaatatgtactacgaaaattcctatgccttagcagtcttatctaactatgatgcaaataaaaccggactgaaggagctgcccatgagaaatttacaggaaatcctgcatggcgccgtgcggttcagcaacaaccctgccctgtgcaacgtggagagcatccagtggcgggacatagtcagcagtgactttctcagcaacatgtcgatggacttccagaaccacctgggcagctgccaaaagtgtgatccaagctgtcccaatgggagctgctggggtgcaggagaggagaactgccagaaactgaccaaaatcatctgtgcccagcagtgctccgggcgctgccgtggcaagtcccccagtgactgctgccacaaccagtgtgctgcaggctgcacaggcccccgggagagcgactgcctggtctgccgcaaattccgagacgaagccacgtgcaaggacacctgccccccactcatgctctacaaccccaccacgtaccagatggatgtgaaccccgagggcaaatacagctttggtgccacctgcgtgaagaagtgtccccgtaattatgtggtgacagatcacggctcgtgcgtccgagcctgtggggccgacagctatgagatggaggaagacggcgtccgcaagtgtaagaagtgcgaagggccttgccgcaaagtgtgtaacggaataggtattggtgaatttaaagactcactctccataaatgctacgaatattaaacacttcaaaaactgcacctccatcagtggcgatctccacatcctgccggtggcatttaggggtgactccttcacacatactcctcctctggatccacaggaactggatattctgaaaaccgtaaaggaaatcacagggtttttgctgattcaggcttggcctgaaaacaggacggacctccatgcctttgagaacctagaaatcatacgcggcaggaccaagcaacatggtcagttttctcttgcagtcgtcagcctgaacataacatccttgggattacgctccctcaaggagataagtgatggagatgtgataatttcaggaaacaaaaatttgtgctatgcaaatacaataaactggaaaaaactgtttgggacctccggtcagaaaaccaaaattataagcaacagaggtgaaaacagctgcaaggccacaggccaggtctgccatgccttgtgctcccccgagggctgctggggcccggagcccagggactgcgtctcttgccggaatgtcagccgaggcagggaatgcgtggacaagtgcaaccttctggagggtgagccaagggagtttgtggagaactctgagtgcatacagtgccacccagagtgcctgcctcaggccatgaacatcacctgcacaggacggggaccagacaactgtatccagtgtgcccactacattgacggcccccactgcgtcaagacctgcccggcaggagtcatgggagaaaacaacaccctggtctggaagtacgcagacgccggccatgtgtgccacctgtgccatccaaactgcacctacggatgcactgggccaggtcttgaaggctgtccaacgaatgggcctaagatcccgtccatcgccactgggatggtgggggccctcctcttgctgctggtggtggccctggggatcggcctcttcatgcgaaggcgccacatcgttcggaagcgcacgctgcggaggctgctgcaggagagggagcttgtggagcctcttacacccagtggagaagctcccaaccaagctctcttgaggatcttgaaggaaactgaattcaaaaagatcaaagtgctgggctccggtgcgttcggcacggtgtataagggactctggatcccagaaggtgagaaagttaaaattcccgtcgctatcaaggaattaagagaagcaacatctccgaaagccaacaaggaaatcctcgatgaagcctacgtgatggccagcgtggacaacccccacgtgtgccgcctgctgggcatctgcctcacctccaccgtgcagctcatcacgcagctcatgcccttcggctgcctcctggactatgtccgggaacacaaagacaatattggctcccagtacctgctcaactggtgtgtgcagatcgcaaagggcatgaactacttggaggaccgtcgcttggtgcaccgcgacctggcagccaggaacgtactggtgaaaacaccgcagcatgtcaagatcacagattttgggctggccaaactgctgggtgcggaagagaaagaataccatgcagaaggaggcaaagtgcctatcaagtggatggcattggaatcaattttacacagaatctatacccaccagagtgatgtctggagctacggggtgaccgtttgggagttgatgacctttggatccaagccatatgacggaatccctgccagcgagatctcctccatcctggagaaaggagaacgcctccctcagccacccatatgtaccatcgatgtctacatgatcatggtcaagtgctggatgatagacgcagatagtcgcccaaagttccgtgagttgatcatcgaattctccaaaatggcccgagacccccagcgctaccttgtcattcagggggatgaaagaatgcatttgccaagtcctacagactccaacttctaccgtgccctgatggatgaagaagacatggacgacgtggtggatgccgacgagtacctcatcccacagcagggcttcttcagcagcccctccacgtcacggactcccctcctgagctctctgagtgcaaccagcaacaattccaccgtggcttgcattgatagaaatgggctgcaaagctgtcccatcaaggaagacagcttcttgcagcgatacagctcagaccccacaggcgccttgactgaggacagcatagacgacaccttcctcccagtgcctgaatacataaaccagtccgttcccaaaaggcccgctggctctgtgcagaatcctgtctatcacaatcagcctctgaaccccgcgcccagcagagacccacactaccaggacccccacagcactgcagtgggcaaccccgagtatctcaacactgtccagcccacctgtgtcaacagcacattcgacagccctgcccactgggcccagaaaggcagccaccaaattagcctggacaaccctgactaccagcaggacttctttcccaaggaagccaagccaaatggcatctttaagggctccacagctgaaaatgcagaatacctaagggtcgcgccacaaagcagtgaatttattggagcatgagtcgac

SEQ ID NO: 598 - protein, 919 aa, human
LEEKKGNYVVTDHGSCVRACGADSYEMEEDGVRKCKKCEGPCRKVCNGIGIGEFKDSLSINATNIKHFKNCTSISGDLHILPVAFRGDSFTHTPPLDPQELDILKTVKEITGFLLIQAWPENRTDLHAFENLEIIRGRTKQHGQFSLAVVSLNITSLGLRSLKEISDGDVIISGNKNLCYANTINWKKLFGTSGQKTKIISNRGENSCKATGQVCHALCSPEGCWGPEPRDCVSCRNVSRGRECVDKCNLLEGEPREFVENSECIQCHPECLPQAMNITCTGRGPDNCIQCAHYIDGPHCVKTCPAGVMGENNTLVWKYADAGHVCHLCHPNCTYGCTGPGLEGCPTNGPKIPSIATGMVGALLLLLVVALGIGLFMRRRHIVRKRTLRRLLQERELVEPLTPSGEAPNQALLRILKETEFKKIKVLGSGAFGTVYKGLWIPEGEKVKIPVAIKELREATSPKANKEILDEAYVMASVDNPHVCRLLGICLTSTVQLITQLMPFGCLLDYVREHKDNIGSQYLLNWCVQIAKGMNYLEDRRLVHRDLAARNVLVKTPQHVKITDFGLAKLLGAEEKEYHAEGGKVPIKWMALESILHRIYTHQSDVWSYGVTVWELMTFGSKPYDGIPASEISSILEKGERLPQPPICTIDVYMIMVKCWMIDADSRPKFRELIIEFSKMARDPQRYLVIQGDERMHLPSPTDSNFYRALMDEEDMDDVVDADEYLIPQQGFFSSPSTSRTPLLSSLSATSNNSTVACIDRNGLQSCPIKEDSFLQRYSSDPTGALTEDSIDDTFLPVPEYINQSVPKRPAGSVQNPVYHNQPLNPAPSRDPHYQDPHSTAVGNPEYLNTVQPTCVNSTFDSPAHWAQKGSHQISLDNPDYQQDFFPKEAKPNGIFKGSTAENAEYLRVAPQSSEFIGA

SEQ ID NO: 599 - DNA, 2850 bp, human
tctagagccaccatgcgaccctccgggacggccggggcagcgctcctggcgctgctggctgcgctctgcccggcgagtcgggctctggaggaaaagaaaggtaattatgtggtgacagatcacggctcgtgcgtccgagcctgtggggccgacagctatgagatggaggaagacggcgtccgcaagtgtaagaagtgcgaagggccttgccgcaaagtgtgtaacggaataggtattggtgaatttaaagactcactctccataaatgctacgaatattaaacacttcaaaaactgcacctccatcagtggcgatctccacatcctgccggtggcatttaggggtgactccttcacacatactcctcctctggatccacaggaactggatattctgaaaaccgtaaaggaaatcacagggtttttgctgattcaggcttggcctgaaaacaggacggacctccatgcctttgagaacctagaaatcatacgcggcaggaccaagcaacatggtcagttttctcttgcagtcgtcagcctgaacataacatccttgggattacgctccctcaaggagataagtgatggagatgtgataatttcaggaaacaaaaatttgtgctatgcaaatacaataaactggaaaaaactgtttgggacctccggtcagaaaaccaaaattataagcaacagaggtgaaaacagctgcaaggccacaggccaggtctgccatgccttgtgctcccccgagggctgctggggcccggagcccagggactgcgtctcttgccggaatgtcagccgaggcagggaatgcgtggacaagtgcaaccttctggagggtgagccaagggagtttgtggagaactctgagtgcatacagtgccacccagagtgcctgcctcaggccatgaacatcacctgcacaggacggggaccagacaactgtatccagtgtgcccactacattgacggcccccactgcgtcaagacctgcccggcaggagtcatgggagaaaacaacaccctggtctggaagtacgcagacgccggccatgtgtgccacctgtgccatccaaactgcacctacggatgcactgggccaggtcttgaaggctgtccaacgaatgggcctaagatcccgtccatcgccactgggatggtgggggccctcctcttgctgctggtggtggccctggggatcggcctcttcatgcgaaggcgccacatcgttcggaagcgcacgctgcggaggctgctgcaggagagggagcttgtggagcctcttacacccagtggagaagctcccaaccaagctctcttgaggatcttgaaggaaactgaattcaaaaagatcaaagtgctgggctccggtgcgttcggcacggtgtataagggactctggatcccagaaggtgagaaagttaaaattcccgtcgctatcaaggaattaagagaagcaacatctccgaaagccaacaaggaaatcctcgatgaagcctacgtgatggccagcgtggacaacccccacgtgtgccgcctgctgggcatctgcctcacctccaccgtgcagctcatcacgcagctcatgcccttcggctgcctcctggactatgtccgggaacacaaagacaatattggctcccagtacctgctcaactggtgtgtgcagatcgcaaagggcatgaactacttggaggaccgtcgcttggtgcaccgcgacctggcagccaggaacgtactggtgaaaacaccgcagcatgtcaagatcacagattttgggctggccaaactgctgggtgcggaagagaaagaataccatgcagaaggaggcaaagtgcctatcaagtggatggcattggaatcaattttacacagaatctatacccaccagagtgatgtctggagctacggggtgaccgtttgggagttgatgacctttggatccaagccatatgacggaatccctgccagcgagatctcctccatcctggagaaaggagaacgcctccctcagccacccatatgtaccatcgatgtctacatgatcatggtcaagtgctggatgatagacgcagatagtcgcccaaagttccgtgagttgatcatcgaattctccaaaatggcccgagacccccagcgctaccttgtcattcagggggatgaaagaatgcatttgccaagtcctacagactccaacttctaccgtgccctgatggatgaagaagacatggacgacgtggtggatgccgacgagtacctcatcccacagcagggcttcttcagcagcccctccacgtcacggactcccctcctgagctctctgagtgcaaccagcaacaattccaccgtggcttgcattgatagaaatgggctgcaaagctgtcccatcaaggaagacagcttcttgcagcgatacagctcagaccccacaggcgccttgactgaggacagcatagacgacaccttcctcccagtgcctgaatacataaaccagtccgttcccaaaaggcccgctggctctgtgcagaatcctgtctatcacaatcagcctctgaaccccgcgcccagcagagacccacactaccaggacccccacagcactgcagtgggcaaccccgagtatctcaacactgtccagcccacctgtgtcaacagcacattcgacagccctgcccactgggcccagaaaggcagccaccaaattagcctggacaaccctgactaccagcaggacttctttcccaaggaagccaagccaaatggcatctttaagggctccacagctgaaaatgcagaatacctaagggtcgcgccacaaagcagtgaatttattggagcatgagtcgac

SEQ ID NO: 600 - protein, 919 aa, cynomolgus
LEEKKGNYVVTDHGSCVRACGADSYEMEEDGVRKCKKCEGPCRKVCNGIGIGEFKDTLSINATNIKHFKNCTSISGDLHILPVAFRGDSFTHTPPLDPQELDILKTVKEITGFLLIQAWPENRTDLHAFENLEIIRGRTKQHGQFSLAVVSLNITSLGLRSLKEISDGDVIISGNKNLCYANTINWKKLFGTSSQKTKIISNRGENSCKATGQVCHALCSPEGCWGPEPRDCVSCQNVSRGRECVDKCNILEGEPREFVENSECIQCHPECLPQVMNITCTGRGPDNCIQCAHYIDGPHCVKTCPAGVMGENNTLVWKYADAGHVCHLCHPNCTYGCTGPGLEGCARNGPKIPSIATGMLGALLLLLVVALGIGLFMRRRHIVRKRTLRRLLQERELVEPLTPSGEAPNQALLRILKETEFKKIKVLGSGAFGTVYKGLWIPEGEKVKIPVAIKELREATSPKANKEILDEAYVMASVDNPHVCRLLGICLTSTVQLITQLMPFGCLLDYVREHKDNIGSQYLLNWCVQIAKGMNYLEDRRLVHRDLAARNVLVKTPQHVKITDFGLAKLLGAEEKEYHAEGGKVPIKWMALESILHRIYTHQSDVWSYGVTVWELMTFGSKPYDGIPASEISSILEKGERLPQPPICTIDVYMIMVKCWMIDADSRPKFRELIIEFSKMARDPQRYLVIQGDERMHLPSPTDSNFYRALMDEEDMDDVVDADEYLIPQQGFFSSPSTSRTPLLSSLSATSNNSTVACIDRNGLQSCPIKEDSFLQRYSSDPTGALTEDSIDDTFLPVPEYINQSVPKRPAGSVQNPVYHNQPLNPAPSRDPHYQDPHSTAVGNPEYLNTVQPTCVNSTFDSPAHWAQKGSHQISLDNPDYQQDFFPKEAKPNGIFKGSTAENAEYLRVAPQSSEFIGA

SEQ ID NO: 601 - DNA, 2850 bp, cynomolgus
  misc_feature (396)..(396): n is a, c, g, or t
  misc_feature (765)..(765): n is a, c, g, or t
tctagagccaccatgcgaccctccgggacggccggggcagcgctcctggcgctgctggctgcgctctgcccggcgagtcgggctctggaggaaaagaaaggtaattatgtggtgacagatcacggctcgtgcgtccgagcctgcggggccgacagctatgagatggaggaagacggcgtccgcaagtgtaagaagtgcgaagggccttgccgcaaagtgtgtaatggaataggtattggtgaatttaaagacacactctccataaatgctacaaatattaaacacttcaaaaactgcacctccatcagtggcgatctccacatcctgccggtggcatttaggggtgactccttcacacacactccgcctctggatccacaggaactggatattctnaaaaccgtaaaggaaatcacagggtttttgctgattcaggcttggcctgaaaacaggacggacctccatgcttttgagaacctagaaatcatacgtggcaggaccaagcaacacggtcagttttctcttgcggtcgtcagcctgaacataacatccttgggattacgctccctcaaggagataagcgatggagatgtgataatttcaggaaacaaaaatttgtgctatgcaaatacaataaactggaaaaaactgtttgggacctccagtcagaaaaccaaaattataagcaacagaggtgaaaacagctgcaaggccacgggccaggtctgccatgccttgtgctcccccgagggctgctggggcccngagcccagggactgcgtctcctgccagaatgtcagccgaggcagagaatgcgtggacaagtgcaacatcctggagggcgagccaagggagtttgtggagaactctgagtgcatacagtgccacccagaatgcctgccccaggtcatgaacatcacctgcacaggacggggaccagacaactgtatccagtgtgcccactacattgacggcccccactgcgtcaagacctgcccagcaggagtcatgggagaaaacaacaccctggtctggaagtacgcagacgccggccacgtgtgccacctgtgccatccaaactgcacctacggatgcactgggccaggtcttgaaggctgtgcaaggaacgggcctaagatcccatccatcgccactggcatgctgggggccctcctcttgctgctggtggtggccctggggatcggcctcttcatgcgaaggcgccacatcgttcggaagcgcacgctgcggaggctgctgcaggagagggagcttgtggagcctcttacacccagtggagaagctcccaaccaagctctcttgaggatcttgaaggaaactgaattcaaaaagatcaaagtgctgggctccggtgcgttcggcacggtgtataagggactctggatcccagaaggtgagaaagttaaaattcccgtcgctatcaaggaattaagagaagcaacatctccgaaagccaacaaggaaatcctcgatgaagcctacgtgatggccagcgtggacaacccccacgtgtgccgcctgctgggcatctgcctcacctccaccgtgcagctcatcacgcagctcatgcccttcggctgcctcctggactatgtccgggaacacaaagacaatattggctcccagtacctgctcaactggtgtgtgcagatcgcaaagggcatgaactacttggaggaccgtcgcttggtgcaccgcgacctggcagccaggaacgtactggtgaaaacaccgcagcatgtcaagatcacagattttgggctggccaaactgctgggtgcggaagagaaagaataccatgcagaaggaggcaaagtgcctatcaagtggatggcattggaatcaattttacacagaatctatacccaccagagtgatgtctggagctacggggtgaccgtttgggagttgatgacctttggatccaagccatatgacggaatccctgccagcgagatctcctccatcctggagaaaggagaacgcctccctcagccacccatatgtaccatcgatgtctacatgatcatggtcaagtgctggatgatagacgcagatagtcgcccaaagttccgtgagttgatcatcgaattctccaaaatggcccgagacccccagcgctaccttgtcattcagggggatgaaagaatgcatttgccaagtcctacagactccaacttctaccgtgccctgatggatgaagaagacatggacgacgtggtggatgccgacgagtacctcatcccacagcagggcttcttcagcagcccctccacgtcacggactcccctcctgagctctctgagtgcaaccagcaacaattccaccgtggcttgcattgatagaaatgggctgcaaagctgtcccatcaaggaagacagcttcttgcagcgatacagctcagaccccacaggcgccttgactgaggacagcatagacgacaccttcctcccagtgcctgaatacataaaccagtccgttcccaaaaggcccgctggctctgtgcagaatcctgtctatcacaatcagcctctgaaccccgcgcccagcagagacccacactaccaggacccccacagcactgcagtgggcaaccccgagtatctcaacactgtccagcccacctgtgtcaacagcacattcgacagccctgcccactgggcccagaaaggcagccaccaaattagcctggacaaccctgactaccagcaggacttctttcccaaggaagccaagccaaatggcatctttaagggctccacagctgaaaatgcagaatacctaagggtcgcgccacaaagcagtgaatttattggagcatgagtcgac

SEQ ID NO: 602 - protein, 1186 aa, cynomolgus; identical to SEQ ID NO: 371

SEQ ID NO: 603 - DNA, 3630 bp, cynomolgus; identical to SEQ ID NO: 372
  misc_feature (1185)..(1185): n is a, c, g, or t
  misc_feature (1554)..(1554): n is a, c, g, or t

SEQ ID NO: 604 - DNA, 1380 bp, human
atggctcccctgtgccccagcccctggctccctctgttgatcccggcccctgctccaggcctcactgtgcaactgctgctgtcactgctgcttctggtgcctgtccatccccagaggttgccccggatgcaggaggattcccccttgggaggaggctcttctggggaagatgacccactgggcgaggaggatctgcccagtgaagaggattcacccagagaggaggatccacccggagaggaggatctacctggagaggaggatctacctggagaggaggatctacctgaagttaagcctaaatcagaagaagagggctccctgaagttagaggatctacctactgttgaggctcctggagatcctcaagaaccccagaataatgcccacagggacaaagaaggggatgaccagagtcattggcgctatggaggcgacccgccctggccccgggtgtccccagcctgcgcgggccgcttccagtccccggtggatatccgcccccagctcgccgccttctgcccggccctgcgccccctggaactcctgggcttccagctcccgccgctcccagaactgcgcctgcgcaacaatggccacagtgtgcaactgaccctgcctcctgggctagagatggctctgggtcccgggcgggagtaccgggctctgcagctgcatctgcactggggggctgcaggtcgtccgggctcggagcacactgtggaaggccaccgtttccctgccgagatccacgtggttcacctcagcaccgcctttgccagagttgacgaggccttggggcgcccgggaggcctggccgtgttggccgcctttctggaggagggcccggaagaaaacagtgcctatgagcagttgctgtctcgcttggaagaaatcgctgaggaaggctcagagactcaggtcccaggactggacatatctgcactcctgccctctgacttcagccgctacttccaatatgaggggtctctgactacaccgccctgtgcccagggtgtcatctggactgtgtttaaccagacagtgatgctgagtgctaagcagctccacaccctctctgacaccctgtggggacctggtgactctcggctacagctgaacttccgagcgacgcagcctttgaatgggcgagtgattgaggcctccttccctgctggagtggacagcagtcctcgggctgctgagccagtccagctgaattcctgcctggctgctggtgacatcctagccctggtttttggcctcctttttgctgtcaccagcgtcgcgttccttgtgcagatgagaaggcagcacagaaggggaaccaaagggggtgtgagctaccgcccagcagaggtagccgagactggagcctag

SEQ ID NO: 605 - protein, 459 aa, human
MAPLCPSPWLPLLIPAPAPGLTVQLLLSLLLLVPVHPQRLPRMQEDSPLGGGSSGEDDPLGEEDLPSEEDSPREEDPPGEEDLPGEEDLPGEEDLPEVKPKSEEEGSLKLEDLPTVEAPGDPQEPQNNAHRDKEGDDQSHWRYGGDPPWPRVSPACAGRFQSPVDIRPQLAAFCPALRPLELLGFQLPPLPELRLRNNGHSVQLTLPPGLEMALGPGREYRALQLHLHWGAAGRPGSEHTVEGHRFPAEIHVVHLSTAFARVDEALGRPGGLAVLAAFLEEGPEENSAYEQLLSRLEEIAEEGSETQVPGLDISALLPSDFSRYFQYEGSLTTPPCAQGVIWTVFNQTVMLSAKQLHTLSDTLWGPGDSRLQLNFRATQPLNGRVIEASFPAGVDSSPRAAEPVQLNSCLAAGDILALVFGLLFAVTSVAFLVQMRRQHRRGTKGGVSYRPAEVAETGA

SEQ ID NO: 606 - DNA, 1344 bp, macaque
atggctcccctgtgccccagcccctggctccctctgttgatcccagcccctgctccaggcctcactgtgcaactgctgctgtcactgctgcttctggtgcctgcccatgcccagaggctgccccggatgcaggaggattccccgctgggaggaggctcttctggggaagatgacccactgcatgaggaggatctgcccagtgaagaggatccacccagagaggaggatccacccagagaggaggatctacctgaagttaagcctaaatcagaagaagagggctccctgaagttagaggatctacctactgttgaggctcctggagatcctcaagaaccccagaataatgcccacagggacaaagaaggggataaccagagacactggcgctatggaggcgacccgccctggccccaggtgtccccagcctgcgcgggccgcttccagtccccggtagatatccgcccccagctcgccgccttctgccccgccctgcgacccctggaactcctgggcttcgagctcccgctgctcccagaactgcgcctgcgcaacaatggccacagtgtgcaactgaccctgccttccgggctagagatggctctgggtcccgggcgggagtaccgggctctgcagctgcatctgcactggggtgctgtaggtcgtccgggctcggagcacactgtggaaggccaccgtttccctgccgagatccacgtggttcacatcagcaccgcctatgccagagttgaggaggccttggggcgccccggaggcctggccgtgttggccgcttttctggaggagggcccagaagaaaacagtgcctatgagcagttgctgtctcacttggaagaaatcgctgaggaaggctcagagactcaggtcccaggactggacgtatctgcactcctgccctctgacctcagccgctacttccgatatgaggggtctctgactacaccgccctgtgcccagggtgtcatctggactgtgtttaaccagacagtgatgctgagtgctaagcagctccacgccctctctgacgccctgtggggacctggtgactctcggctacagctgaacttccgagtgacgcagcctttgaatgggcgagtgattgaggcctccttccctgctgaagtggacagcagtcctcgggctgctgagccagtccagctgaattcctgcctggctgctggtgacatcctagccctggtttttggcctcctttttgctgtcaccagcgtcgccttccttgtgcagatgagaaggcaacacagaaggggaaccaaagggggtgtgagctaccacccagcagaggtagccgagactggagcctag

SEQ ID NO: 607 - protein, 447 aa, macaque
MAPLCPSPWLPLLIPAPAPGLTVQLLLSLLLLVPAHAQRLPRMQEDSPLGGGSSGEDDPLHEEDLPSEEDPPREEDPPREEDLPEVKPKSEEEGSLKLEDLPTVEAPGDPQEPQNNAHRDKEGDNQRHWRYGGDPPWPQVSPACAGRFQSPVDIRPQLAAFCPALRPLELLGFELPLLPELRLRNNGHSVQLTLPSGLEMALGPGREYRALQLHLHWGAVGRPGSEHTVEGHRFPAEIHVVHISTAYARVEEALGRPGGLAVLAAFLEEGPEENSAYEQLLSHLEEIAEEGSETQVPGLDVSALLPSDLSRYFRYEGSLTTPPCAQGVIWTVFNQTVMLSAKQLHALSDALWGPGDSRLQLNFRVTQPLNGRVIEASFPAEVDSSPRAAEPVQLNSCLAAGDILALVFGLLFAVTSVAFLVQMRRQHRRGTKGGVSYHPAEVAETGA

SEQ ID NO: 608 - DNA, 2229 bp, human
atggacaagttttggtggcacgcagcctggggactctgcctcgtgccgctgagcctggcgcagatcgatttgaatataacctgccgctttgcaggtgtattccacgtggagaaaaatggtcgctacagcatctctcggacggaggccgctgacctctgcaaggctttcaatagcaccttgcccacaatggcccagatggagaaagctctgagcatcggatttgagacctgcaggtatgggttcatagaagggcatgtggtgattccccggatccaccccaactccatctgtgcagcaaacaacacaggggtgtacatcctcacatacaacacctcccagtatgacacatattgcttcaatgcttcagctccacctgaagaagattgtacatcagtcacagacctgcccaatgcctttgatggaccaattaccataactattgttaaccgtgatggcacccgctatgtccagaaaggagaatacagaacgaatcctgaagacatctaccccagcaaccctactgatgatgacgtgagcagcggctcctccagtgaaaggagcagcacttcaggaggttacatcttttacaccttttctactgtacaccccatcccagacgaagacagtccctggatcaccgacagcacagacagaatccctgctaccactttgatgagcactagtgctacagcaactgagacagcaaccaagaggcaagaagcctgggattggttttcatggttgtttctaccatcagagtcaaagaatcatcttcacacaacaacacaaatggctggtacgtcttcaaataccatctcagcaggctgggagccaaatgaagaaaatgaagatgaaagagacagacacctcagtttttctggatcaggcattgatgatgatgaagattttatctccagcaccatttcaaccacaccacgggcctttgaccacacaaaacagaaccaggactggacccagtggaacccaagccattcaaatccggaagtgctacttcagacaaccacaaggatgactgatgtagacagaaatggcaccactgcttatgaaggaaactggaacccagaagcacaccctcccctcattcaccatgagcatcatgaggaagaagagaccccacattctacaagcacaatccaggcaactcctagtagtacaacggaagaaacagctacccagaaggaacagtggtttggcaacagatggcatgagggatatcgccaaacacccagagaagactcccattcgacaacagggacagctgcagcctcagctcataccagccatccaatgcaaggaaggacaacaccaagcccagaggacagttcctggactgatttcttcaacccaatctcacaccccatgggacgaggtcatcaagcaggaagaaggatggatatggactccagtcatagtacaacgcttcagcctactgcaaatccaaacacaggtttggtggaaaatttggacaggacaggacctctttcaatgacaacgcagcagagtaattctcagagcttctctacatcacatgaaggcttggaagaagataaagaccatccaacaacttctactctgacatcaagcaataggaatgatgtcacaggtggaagaagagacccaaatcattctgaaggctcaactactttactggaaggttatacctctcattacccacacacgaaggaaagcaggaccttcatcccagtgacctcagctaagactgggtcctttggagttactgcagttactgttggagattccaactctaatgtcaatcgttccttatcaggagaccaagacacattccaccccagtggggggtcccataccactcatggatctgaatcagatggacactcacatgggagtcaagaaggtggagcaaacacaacctctggtcctataaggacaccccaaattccagaatggctgatcatcttggcatccctcttggccttggctttgattcttgcagtttgcattgcagtcaacagtcgaagaaggtgtgggcagaagaaaaagctagtgatcaacagtggcaatggagctgtggaggacagaaagccaagtggactcaacggagaggccagcaagtctcaggaaatggtgcatttggtgaacaaggagtcgtcagaaactccagaccagtttatgacagctgatgagacaaggaacctgcagaatgtggacatgaagattggggtgtaa

SEQ ID NO: 609 - protein, 742 aa, human
MDKFWWHAAWGLCLVPLSLAQIDLNITCRFAGVFHVEKNGRYSISRTEAADLCKAFNSTLPTMAQMEKALSIGFETCRYGFIEGHVVIPRIHPNSICAANNTGVYILTYNTSQYDTYCFNASAPPEEDCTSVTDLPNAFDGPITITIVNRDGTRYVQKGEYRTNPEDIYPSNPTDDDVSSGSSSERSSTSGGYIFYTFSTVHPIPDEDSPWITDSTDRIPATTLMSTSATATETATKRQEAWDWFSWLFLPSESKNHLHTTTQMAGTSSNTISAGWEPNEENEDERDRHLSFSGSGIDDDEDFISSTISTTPRAFDHTKQNQDWTQWNPSHSNPEVLLQTTTRMTDVDRNGTTAYEGNWNPEAHPPLIHHEHHEEEETPHSTSTIQATPSSTTEETATQKEQWFGNRWHEGYRQTPREDSHSTTGTAAASAHTSHPMQGRTTPSPEDSSWTDFFNPISHPMGRGHQAGRRMDMDSSHSTTLQPTANPNTGLVENLDRTGPLSMTTQQSNSQSFSTSHEGLEEDKDHPTTSTLTSSNRNDVTGGRRDPNHSEGSTTLLEGYTSHYPHTKESRTFIPVTSAKTGSFGVTAVTVGDSNSNVNRSLSGDQDTFHPSGGSHTTHGSESDGHSHGSQEGGANTTSGPIRTPQIPEWLIILASLLALALILAVCIAVNSRRRCGQKKKLVINSGNGAVEDRKPSGLNGEASKSQEMVHLVNKESSETPDQFMTADETRNLQNVDMKIGV

SEQ ID NO: 610 - DNA, 2100 bp, Artificial
  unknown organism
atggacaagttttggtggcacgcagcctggggactctgcctcgtgccgctgagcctggcgcagatcgatttgaatataacctgccgctttgcaggtgtattccacgtggagaaaaatggtcgctacagcatctctcggacggaggccgctgacctctgcaaggctttcaatagcaccttgcccacaatggcccagatggagaaagctctgagcatcggatttgagacctgcaggtatgggttcatagaagggcatgtggtgattccccggatccaccccaactccatctgtgcagcaaacaacacaggggtgtacatcctcacatacaacacctcccagtatgacacatattgcttcaatgcttcagctccacctgaagaagattgtacatcagtcacagacctgcccaatgcctttgatggaccaattaccataactattgttaaccgtgatggcacccgctatgtccagaaaggagaatacagaacgaatcctgaagacatctaccccagcaaccctactgatgatgacgtgagcagcggctcctccagtgaaaggagcagcacttcaggaggttacatcttttacaccttttctactgtacaccccatcccagacgaagacagtccctggatcaccgacagcacagacagaatccctgctaccactttgatgagcactagtgctacagcaactgagacagcaaccaagaggcaagaagcctgggattggttttcatggttgtttctaccatcagagtcaaagaatcatcttcacacaacaacacaaatggctggtacgtcttcaaataccatctcagcaggctgggagccaaatgaagaaaatgaagatgaaagagacagacacctcagtttttctggatcaggcattgatgatgatgaagattttatctccagcaccatttcaaccacaccacgggcctttgaccacacaaaacagaaccaggactggacccagtggaacccaagccattcaaatccggaagtgctacttcagacaaccacaaggatgactgatgtagacagaaatggcaccactgcttatgaaggaaactggaacccagaagcacaccctcccctcattcaccatgagcatcatgaggaagaagagaccccacattctacaagcacaatcgcctcagctcataccagccatccaatgcaaggaaggacaacaccaagcccagaggacagttcctggactgatttcttcaacccaatctcacaccccatgggacgaggtcatcaagcaggaagaaggatggatatggactccagtcatagtacaacgcttcagcctactgcaaatccaaacacaggtttggtggaaaatttggacaggacaggacctctttcaatgacaacgcagcagagtaattctcagagcttctctacatcacatgaaggcttggaagaagataaagaccatccaacaacttctactctgacatcaagcaataggaatgatgtcacaggtggaagaagagacccaaatcattctgaaggctcaactactttactggaaggttatacctctcattacccacacacgaaggaaagcaggaccttcatcccagtgacctcagctaagactgggtcctttggagttactgcagttactgttggagattccaactctaatgtcaatcgttccttatcaggagaccaagacacattccaccccagtggggggtcccataccactcatggatctgaatcagatggacactcacatgggagtcaagaaggtggagcaaacacaacctctggtcctataaggacaccccaaattccagaatggctgatcatcttggcatccctcttggccttggctttgattcttgcagtttgcattgcagtcaacagtcgaagaaggtgtgggcagaagaaaaagctagtgatcaacagtggcaatggagctgtggaggacagaaagccaagtggactcaacggagaggccagcaagtctcaggaaatggtgcatttggtgaacaaggagtcgtcagaaactccagaccagtttatgacagctgatgagacaaggaacctgcagaatgtggacatgaagattggggtgtaa

SEQ ID NO: 611 - protein, 699 aa, Artificial
  unknown organism
MDKFWWHAAWGLCLVPLSLAQIDLNITCRFAGVFHVEKNGRYSISRTEAADLCKAFNSTLPTMAQMEKALSIGFETCRYGFIEGHVVIPRIHPNSICAANNTGVYILTYNTSQYDTYCFNASAPPEEDCTSVTDLPNAFDGPITITIVNRDGTRYVQKGEYRTNPEDIYPSNPTDDDVSSGSSSERSSTSGGYIFYTFSTVHPIPDEDSPWITDSTDRIPATTLMSTSATATETATKRQEAWDWFSWLFLPSESKNHLHTTTQMAGTSSNTISAGWEPNEENEDERDRHLSFSGSGIDDDEDFISSTISTTPRAFDHTKQNQDWTQWNPSHSNPEVLLQTTTRMTDVDRNGTTAYEGNWNPEAHPPLIHHEHHEEEETPHSTSTIASAHTSHPMQGRTTPSPEDSSWTDFFNPISHPMGRGHQAGRRMDMDSSHSTTLQPTANPNTGLVENLDRTGPLSMTTQQSNSQSFSTSHEGLEEDKDHPTTSTLTSSNRNDVTGGRRDPNHSEGSTTLLEGYTSHYPHTKESRTFIPVTSAKTGSFGVTAVTVGDSNSNVNRSLSGDQDTFHPSGGSHTTHGSESDGHSHGSQEGGANTTSGPIRTPQIPEWLIILASLLALALILAVCIAVNSRRRCGQKKKLVINSGNGAVEDRKPSGLNGEASKSQEMVHLVNKESSETPDQFMTADETRNLQNVDMKIGV

SEQ ID NO: 612 - DNA, 2229 bp, Artificial
  unknown organism
atggacaagttttggtggcacgcagcctggggactctgcctcttgcagctgagcctggcgcagatcgatttgaatataacctgccgctttgcgggtgtattccacgtggagaaaaatggtcgctacagcatctctcggacggaggctgctgacctctgcaaggctttcaatagcaccttgcccacaatggcccagatggagaaagctctgagcgtcggatttgagacctgcaggtacgggttcatagaagggcacgtggtgattccccggattcagcccaactccatctgtgcagcaaaccacacaggggtgtacatcctcacgtccaacacctcccagtatgacacatactgcttcaatgcttcagctccacctaaagaagattgtacatcagtcacagacctgcccaatgcctttgatggaccaattaccataactattgttaaccccgatggcactcgctatatcaagaaaggagaatacagaacgaatcctgaagacatctaccccagcaaccctactgacgatgacgtgagcagcggatcctccagtgaaaggagcagcacttcgggaggttacatctttcacaccttttctactgcacaccccatcccagacgaagacggtccctggatcaccgacagcacagacagaatccctgctaccactttgatgagcactagtgctacagcaactgagacagcaaccaagaggcaagaaacccaggattggttttcatggttgtttctaccatcagagtccaagaatcatcttcacacaacaacacaaatggctggtacgtcttcaaataccatctcagcaggctgggagccaaatgaagaaaatgaagatgaaagagacagacacctcagtttttctggatcaggcattgatgatgatgaagattttatctccagcaccatttcaaccacaccacgggtttttgaccacacaaaacagaacaaggactggacccagtggaacccaagccattcaaatccggaagtgctacttcagacaaccgcaaggataactgatgtagacagaaatggcaccactgctcatgaaggaaactggaacccggaagcacatcctcccctcattcaccatgagcatcatgaggaagaagagaccccacattctacaagcacaatccaggcaattcctagtagtacaactgaagaaacagctacccagaaggaacagtggtttggcaacagatggcatgagggatatctccaaacacccagagaagactcccattcgacaacagggacagctgcagcctcagctcttaccagccatccaatgcaaggaaggacaacaccaagcccagaggacagttcctggactgatttctttgacccaatctcacatcccatgggacgaggtcatcaagcaggaagaaggatggacatggactccagtcatagtacaacgcttcagcctactgcagatccaaacacaggtttggtggaagacttggacaggacaggacctctttcaatgacaacgaagcagagtaattctcagagcttctctacatcacatgaaggcttggaagaagataaagaccatccaacaacttctactctgacatcaagcaataggaatgatgtcacaggtggaagaagagacccaaatcattctgaaggctcaaccactttactggaaggttatacctctcattacccagacacgaaggaaagcaggaccttcatcccagtgacctcagctaagactgggtcctttggagttactgaagttactgttggagattccaactctaatgtcaatcactccttatcaggagaccaagatgcattctaccccagtggggggtcccataccactcatggatctgaatcagctggacactcacatgggagtcaagaaggtggggcaaacacaacctctggtcctgtaaggacaccccaaattccagaatggctgatcatcttggcatccctcttggccttggctttgattcttgcagtttgcattgcagtcaacagtcgaagaaggtgtgggcagaagaaaaagctagtgatcaacagtggcaatggagctgtggatgatagaaagccaagtggactcaatggagaggccagcaagtctcaggaaatggtgcatttggtgaacaaggagccatcagaaactccagaccagtttatgacagctgatgagacaaggaacctgcagaacgtggacatgaagattggggtgtaa

SEQ ID NO: 613 - protein, 742 aa, Artificial
  unknown organism
MDKFWWHAAWGLCLLQLSLAQIDLNITCRFAGVFHVEKNGRYSISRTEAADLCKAFNSTLPTMAQMEKALSVGFETCRYGFIEGHVVIPRIQPNSICAANHTGVYILTSNTSQYDTYCFNASAPPKEDCTSVTDLPNAFDGPITITIVNPDGTRYIKKGEYRTNPEDIYPSNPTDDDVSSGSSSERSSTSGGYIFHTFSTAHPIPDEDGPWITDSTDRIPATTLMSTSATATETATKRQETQDWFSWLFLPSESKNHLHTTTQMAGTSSNTISAGWEPNEENEDERDRHLSFSGSGIDDDEDFISSTISTTPRVFDHTKQNKDWTQWNPSHSNPEVLLQTTARITDVDRNGTTAHEGNWNPEAHPPLIHHEHHEEEETPHSTSTIQAIPSSTTEETATQKEQWFGNRWHEGYLQTPREDSHSTTGTAAASALTSHPMQGRTTPSPEDSSWTDFFDPISHPMGRGHQAGRRMDMDSSHSTTLQPTADPNTGLVEDLDRTGPLSMTTKQSNSQSFSTSHEGLEEDKDHPTTSTLTSSNRNDVTGGRRDPNHSEGSTTLLEGYTSHYPDTKESRTFIPVTSAKTGSFGVTEVTVGDSNSNVNHSLSGDQDAFYPSGGSHTTHGSESAGHSHGSQEGGANTTSGPVRTPQIPEWLIILASLLALALILAVCIAVNSRRRCGQKKKLVINSGNGAVDDRKPSGLNGEASKSQEMVHLVNKEPSETPDQFMTADETRNLQNVDMKIGV

SEQ ID NO: 614 - protein, 115 aa, Artificial
  unknown organism
QVQLVQSGPEVKKPGASVKVSCKASGYTFTEYTIHWVRQAPGKRLEWIGGIDPNNGGTMYNQKFKGRVTLTRDTSASTAYMDLRSLTSEDSAVYYCTRAEAMDYWGQGTTVTVSS

SEQ ID NO: 615 - protein, 5 aa, Artificial
  unknown organism
EYTIH

SEQ ID NO: 616 - protein, 17 aa, Artificial
  unknown organism
GIDPNNGGTMYNQKFKG

SEQ ID NO: 617 - protein, 6 aa, Artificial
  unknown organism
AEAMDY

SEQ ID NO: 618 - DNA, 345 bp, Artificial
  unknown organism
caggtgcagctggtccagtctggacctgaagtgaagaagcctggggcttcagtgaaggtatcctgcaaggcttctggatacacattcactgaatacaccatacactgggtgaggcaggctcctggaaagagacttgagtggattggaggtattgatcctaacaatggtggtaccatgtataaccaaaaattcaagggcagggttacattaactcgtgacacgtctgccagcacagcctacatggacctgcgcagtctgacgtctgaggattctgcagtctattactgcacaagagcagaggctatggactactggggtcaaggaaccacggtcaccgtctcctca

SEQ ID NO: 619 - protein, 112 aa, Artificial
  unknown organism
DVVMTQSPLSLPVTLGQPASISCRSSESLVYRDGNTYLSWFHQRPGQSPRRLIYKVSNRDSGVPDRFSGSGSGTEFTLKISRVEAEDVGVYYCMQHTFWPWTFGQGTKVDIK

SEQ ID NO: 620 - protein, 16 aa, Artificial
  unknown organism
RSSESLVYRDGNTYLS

SEQ ID NO: 621 - protein, 7 aa, Artificial
  unknown organism
KVSNRDS

SEQ ID NO: 622 - protein, 9 aa, Artificial
  unknown organism
MQHTFWPWT

SEQ ID NO: 623 - DNA, 336 bp, Artificial
  unknown organism
gatgtcgtgatgactcagtctccactctccctgcccgtcacccttggacagccggcctccatctcctgcaggtctagtgaaagtctcgtttacagggatggaaacacgtacttgagttggtttcaccagaggcccggccaatctccaaggcgcctaatttataaggtctctaaccgggactctggggtcccagacagattcagcggcagtgggtcaggcactgagttcacactgaaaatcagcagggtggaggctgaggatgttggggtttattactgcatgcaacatacattctggccttggactttcggccaagggaccaaagtggatatcaaa

SEQ ID NO: 624 - protein, 242 aa, Artificial
  unknown organism
QVQLVQSGPEVKKPGASVKVSCKASGYTFTEYTIHWVRQAPGKRLEWIGGIDPNNGGTMYNQKFKGRVTLTRDTSASTAYMDLRSLTSEDSAVYYCTRAEAMDYWGQGTTVTVSSGGGGSGGGGSGGGGSDVVMTQSPLSLPVTLGQPASISCRSSESLVYRDGNTYLSWFHQRPGQSPRRLIYKVSNRDSGVPDRFSGSGSGTEFTLKISRVEAEDVGVYYCMQHTFWPWTFGQGTKVDIK

SEQ ID NO: 625 - DNA, 726 bp, Artificial
  unknown organism
caggtgcagctggtccagtctggacctgaagtgaagaagcctggggcttcagtgaaggtatcctgcaaggcttctggatacacattcactgaatacaccatacactgggtgaggcaggctcctggaaagagacttgagtggattggaggtattgatcctaacaatggtggtaccatgtataaccaaaaattcaagggcagggttacattaactcgtgacacgtctgccagcacagcctacatggacctgcgcagtctgacgtctgaggattctgcagtctattactgcacaagagcagaggctatggactactggggtcaaggaaccacggtcaccgtctcctcaggtggtggtggttctggcggcggcggctccggtggtggtggttctgatgtcgtgatgactcagtctccactctccctgcccgtcacccttggacagccggcctccatctcctgcaggtctagtgaaagtctcgtttacagggatggaaacacgtacttgagttggtttcaccagaggcccggccaatctccaaggcgcctaatttataaggtctctaaccgggactctggggtcccagacagattcagcggcagtgggtcaggcactgagttcacactgaaaatcagcagggtggaggctgaggatgttggggtttattactgcatgcaacatacattctggccttggactttcggccaagggaccaaagtggatatcaaa

SEQ ID NO: 626 - protein, 497 aa, Artificial
  unknown organism
QVQLVQSGPEVKKPGASVKVSCKASGYTFTEYTIHWVRQAPGKRLEWIGGIDPNNGGTMYNQKFKGRVTLTRDTSASTAYMDLRSLTSEDSAVYYCTRAEAMDYWGQGTTVTVSSGGGGSGGGGSGGGGSDVVMTQSPLSLPVTLGQPASISCRSSESLVYRDGNTYLSWFHQRPGQSPRRLIYKVSNRDSGVPDRFSGSGSGTEFTLKISRVEAEDVGVYYCMQHTFWPWTFGQGTKVDIKSGGGGSEVQLVESGGGLVQPGGSLKLSCAASGFTFNKYAMNWVRQAPGKGLEWVARIRSKYNNYATYYADSVKDRFTISRDDSKNTAYLQMNNLKTEDTAVYYCVRHGNFGNSYISYWAYWGQGTLVTVSSGGGGSGGGGSGGGGSQTVVTQEPSLTVSPGGTVTLTCGSSTGAVTSGYYPNWVQQKPGQAPRGLIGGTKFLAPGTPARFSGSLLGGKAALTLSGVQPEDEAEYYCALWYSNRWVFGGGTKLTVL

SEQ ID NO: 627 - DNA, 1491 bp, Artificial
  unknown organism
caggtgcagctggtccagtctggacctgaagtgaagaagcctggggcttcagtgaaggtatcctgcaaggcttctggatacacattcactgaatacaccatacactgggtgaggcaggctcctggaaagagacttgagtggattggaggtattgatcctaacaatggtggtaccatgtataaccaaaaattcaagggcagggttacattaactcgtgacacgtctgccagcacagcctacatggacctgcgcagtctgacgtctgaggattctgcagtctattactgcacaagagcagaggctatggactactggggtcaaggaaccacggtcaccgtctcctcaggtggtggtggttctggcggcggcggctccggtggtggtggttctgatgtcgtgatgactcagtctccactctccctgcccgtcacccttggacagccggcctccatctcctgcaggtctagtgaaagtctcgtttacagggatggaaacacgtacttgagttggtttcaccagaggcccggccaatctccaaggcgcctaatttataaggtctctaaccgggactctggggtcccagacagattcagcggcagtgggtcaggcactgagttcacactgaaaatcagcagggtggaggctgaggatgttggggtttattactgcatgcaacatacattctggccttggactttcggccaagggaccaaagtggatatcaaatccggaggtggtggatccgaggtgcagctggtcgagtctggaggaggattggtgcagcctggagggtcattgaaactctcatgtgcagcctctggattcaccttcaataagtacgccatgaactgggtccgccaggctccaggaaagggtttggaatgggttgctcgcataagaagtaaatataataattatgcaacatattatgccgattcagtgaaagacaggttcaccatctccagagatgattcaaaaaacactgcctatctacaaatgaacaacttgaaaactgaggacactgccgtgtactactgtgtgagacatgggaacttcggtaatagctacatatcctactgggcttactggggccaagggactctggtcaccgtctcctcaggtggtggtggttctggcggcggcggctccggtggtggtggttctcagactgttgtgactcaggaaccttcactcaccgtatcacctggtggaacagtcacactcacttgtggctcctcgactggggctgttacatctggctactacccaaactgggtccaacaaaaaccaggtcaggcaccccgtggtctaataggtgggactaagttcctcgcccccggtactcctgccagattctcaggctccctgcttggaggcaaggctgccctcaccctctcaggggtacagccagaggatgaggcagaatattactgtgctctatggtacagcaaccgctgggtgttcggtggaggaaccaaactgactgtccta

SEQ ID NO: 628 - protein, 497 aa, Artificial
  unknown organism
QVQLVQSGPEVKKPGASVKVSCKASGYTFTEYTIHWVRQAPGKRLEWIGGIDPNNGGTMYNQKFKGRVTLTRDTSASTAYMDLRSLTSEDSAVYYCTRAEAMDYWGQGTTVTVSSGGGGSGGGGSGGGGSDVVMTQSPLSLPVTLGQPASISCRSSESLVYRDGNTYLSWFHQRPGQSPRRLIYKVSNRDSGVPDRFSGSGSGTEFTLKISRVEAEDVGVYYCMQHTFWPWTFGQGTKVDIKSGGGGSEVQLVESGGGLVQPGGSLKLSCAASGFTFNSYAMNWVRQAPGKGLEWVARIRSKYNNYATYYADSVKGRFTISRDDSKNTAYLQMNNLKTEDTAVYYCVRHGNFGNSYVSWWAYWGQGTLVTVSSGGGGSGGGGSGGGGSQTVVTQEPSLTVSPGGTVTLTCGSSTGAVTSGNYPNWVQQKPGQAPRGLIGGTKFLAPGTPARFSGSLLGGKAALTLSGVQPEDEAEYYCVLWYSNRWVFGGGTKLTVL

SEQ ID NO: 629 - DNA, 1491 bp, Artificial
  unknown organism
caggtgcagctggtccagtctggacctgaagtgaagaagcctggggcttcagtgaaggtatcctgcaaggcttctggatacacattcactgaatacaccatacactgggtgaggcaggctcctggaaagagacttgagtggattggaggtattgatcctaacaatggtggtaccatgtataaccaaaaattcaagggcagggttacattaactcgtgacacgtctgccagcacagcctacatggacctgcgcagtctgacgtctgaggattctgcagtctattactgcacaagagcagaggctatggactactggggtcaaggaaccacggtcaccgtctcctcaggtggtggtggttctggcggcggcggctccggtggtggtggttctgatgtcgtgatgactcagtctccactctccctgcccgtcacccttggacagccggcctccatctcctgcaggtctagtgaaagtctcgtttacagggatggaaacacgtacttgagttggtttcaccagaggcccggccaatctccaaggcgcctaatttataaggtctctaaccgggactctggggtcccagacagattcagcggcagtgggtcaggcactgagttcacactgaaaatcagcagggtggaggctgaggatgttggggtttattactgcatgcaacatacattctggccttggactttcggccaagggaccaaagtggatatcaaatccggaggtggtggatccgaggtgcagctggtcgagtctggaggaggattggtgcagcctggagggtcattgaaactctcatgtgcagcctctggattcaccttcaatagctacgccatgaactgggtccgccaggctccaggaaagggtttggaatgggttgctcgcataagaagtaaatataataattatgcaacatattatgccgattcagtgaaaggcaggttcaccatctccagagatgattcaaaaaacactgcctatctacaaatgaacaacttgaaaactgaggacactgccgtgtactactgtgtgagacatgggaacttcggtaatagctacgtttcctggtgggcttactggggccaagggactctggtcaccgtctcctcaggtggtggtggttctggcggcggcggctccggtggtggtggttctcagactgttgtgactcaggaaccttcactcaccgtatcacctggtggaacagtcacactcacttgtggctcctcgactggggctgttacatctggcaactacccaaactgggtccaacaaaaaccaggtcaggcaccccgtggtctaataggtgggactaagttcctcgcccccggtactcctgccagattctcaggctccctgcttggaggcaaggctgccctcaccctctcaggggtacagccagaggatgaggcagaatattactgtgttctatggtacagcaaccgctgggtgttcggtggaggaaccaaactgactgtccta

SEQ ID NO: 630 - protein, 497 aa, Artificial
  unknown organism
QVQLVQSGPEVKKPGASVKVSCKASGYTFTEYTIHWVRQAPGKRLEWIGGIDPNNGGTMYNQKFKGRVTLTRDTSASTAYMDLRSLTSEDSAVYYCTRAEAMDYWGQGTTVTVSSGGGGSGGGGSGGGGSDVVMTQSPLSLPVTLGQPASISCRSSESLVYRDGNTYLSWFHQRPGQSPRRLIYKVSNRDSGVPDRFSGSGSGTEFTLKISRVEAEDVGVYYCMQHTFWPWTFGQGTKVDIKSGGGGSEVQLVESGGGLVQPGGSLKLSCAASGFTFNKYAMNWVRQAPGKGLEWVARIRSKYNNYATYYADSVKDRFTISRDDSKNTAYLQMNNLKTEDTAVYYCVRHGNFGNSYISYWAYWGQGTLVTVSSGGGGSGGGGSGGGGSQTVVTQEPSLTVSPGGTVTLTCGSSTGAVTSGNYPNWVQQKPGQAPRGLIGGTKFLAPGTPARFSGSLLGGKAALTLSGVQPEDEAEYYCVLWYSNRWVFGGGTKLTVL

SEQ ID NO: 631 - DNA, 1491 bp, Artificial
  unknown organism
caggtgcagctggtccagtctggacctgaagtgaagaagcctggggcttcagtgaaggtatcctgcaaggcttctggatacacattcactgaatacaccatacactgggtgaggcaggctcctggaaagagacttgagtggattggaggtattgatcctaacaatggtggtaccatgtataaccaaaaattcaagggcagggttacattaactcgtgacacgtctgccagcacagcctacatggacctgcgcagtctgacgtctgaggattctgcagtctattactgcacaagagcagaggctatggactactggggtcaaggaaccacggtcaccgtctcctcaggtggtggtggttctggcggcggcggctccggtggtggtggttctgatgtcgtgatgactcagtctccactctccctgcccgtcacccttggacagccggcctccatctcctgcaggtctagtgaaagtctcgtttacagggatggaaacacgtacttgagttggtttcaccagaggcccggccaatctccaaggcgcctaatttataaggtctctaaccgggactctggggtcccagacagattcagcggcagtgggtcaggcactgagttcacactgaaaatcagcagggtggaggctgaggatgttggggtttattactgcatgcaacatacattctggccttggactttcggccaagggaccaaagtggatatcaaatccggaggtggtggatccgaggtgcagctggtcgagtctggaggaggattggtgcagcctggagggtcattgaaactctcatgtgcagcctctggattcaccttcaataagtacgccatgaactgggtccgccaggctccaggaaagggtttggaatgggttgctcgcataagaagtaaatataataattatgcaacatattatgccgattcagtgaaagacaggttcaccatctccagagatgattcaaaaaacactgcctatctacaaatgaacaacttgaaaactgaggacactgccgtgtactactgtgtgagacatgggaacttcggtaatagctacatatcctactgggcttactggggccaagggactctggtcaccgtctcctcaggtggtggtggttctggcggcggcggctccggtggtggtggttctcagactgttgtgactcaggaaccttcactcaccgtatcacctggtggaacagtcacactcacttgtggctcctcgactggggctgttacatctggcaactacccaaactgggtccaacaaaaaccaggtcaggcaccccgtggtctaataggtgggactaagttcctcgcccccggtactcctgccagattctcaggctccctgcttggaggcaaggctgccctcaccctctcaggggtacagccagaggatgaggcagaatattactgtgttctatggtacagcaaccgctgggtgttcggtggaggaaccaaactgactgtccta

SEQ ID NO: 632 - protein, 115 aa, Artificial
  unknown organism
QVQLVQSGAEVKKPGASVKISCKTSGYTFTEYTIHWVRQAPGQRLEWMGGIDPNNGGTMYNQKFKGRVTISRDTSASTAYMELSSLTSEDTAVYYCTRAEAMDYWGQGTTVTVSS

SEQ ID NO: 633 - protein, 5 aa, Artificial
  unknown organism
EYTIH

SEQ ID NO: 634 - protein, 17 aa, Artificial
  unknown organism
GIDPNNGGTMYNQKFKG

SEQ ID NO: 635 - protein, 6 aa, Artificial
  unknown organism
AEAMDY

SEQ ID NO: 636 - DNA, 345 bp, Artificial
  unknown organism
caggtgcagctggtccagtctggagctgaagtgaagaagcctggggcttcagtgaagatatcctgcaagacttctggatacacattcactgaatacaccatacactgggtgaggcaggctcctggacagagacttgagtggatgggaggtattgatcctaacaatggtggtaccatgtataaccaaaaattcaagggcagggtcacaataagtcgtgacacgtctgccagcacagcctacatggagctgagcagtctgacgtctgaggatactgcagtctattactgcacaagagcagaggctatggactactggggtcaaggaaccacggtcaccgtctcctca

SEQ ID NO: 637 - protein, 112 aa, Artificial; identical to SEQ ID NO: 619
  unknown organism

SEQ ID NO: 638 - protein, 16 aa, Artificial
  unknown organism
RSSESLVYRDGNTYLS

SEQ ID NO: 639 - protein, 9 aa, Artificial
  unknown organism
MQHTFWPWT

SEQ ID NO: 640 - DNA, 336 bp, Artificial; identical to SEQ ID NO: 623
  unknown organism

SEQ ID NO: 641 - protein, 242 aa, Artificial
  unknown organism
QVQLVQSGAEVKKPGASVKISCKTSGYTFTEYTIHWVRQAPGQRLEWMGGIDPNNGGTMYNQKFKGRVTISRDTSASTAYMELSSLTSEDTAVYYCTRAEAMDYWGQGTTVTVSSGGGGSGGGGSGGGGSDVVMTQSPLSLPVTLGQPASISCRSSESLVYRDGNTYLSWFHQRPGQSPRRLIYKVSNRDSGVPDRFSGSGSGTEFTLKISRVEAEDVGVYYCMQHTFWPWTFGQGTKVDIK

SEQ ID NO: 642 - DNA, 726 bp, Artificial
  unknown organism
caggtgcagctggtccagtctggagctgaagtgaagaagcctggggcttcagtgaagatatcctgcaagacttctggatacacattcactgaatacaccatacactgggtgaggcaggctcctggacagagacttgagtggatgggaggtattgatcctaacaatggtggtaccatgtataaccaaaaattcaagggcagggtcacaataagtcgtgacacgtctgccagcacagcctacatggagctgagcagtctgacgtctgaggatactgcagtctattactgcacaagagcagaggctatggactactggggtcaaggaaccacggtcaccgtctcctcaggtggtggtggttctggcggcggcggctccggtggtggtggttctgatgtcgtgatgactcagtctccactctccctgcccgtcacccttggacagccggcctccatctcctgcaggtctagtgaaagtctcgtttacagggatggaaacacgtacttgagttggtttcaccagaggcccggccaatctccaaggcgcctaatttataaggtctctaaccgggactctggggtcccagacagattcagcggcagtgggtcaggcactgagttcacactgaaaatcagcagggtggaggctgaggatgttggggtttattactgcatgcaacatacattctggccttggactttcggccaagggaccaaagtggatatcaaa

SEQ ID NO: 643 - protein, 497 aa, Artificial
  unknown organism
QVQLVQSGAEVKKPGASVKISCKTSGYTFTEYTIHWVRQAPGQRLEWMGGIDPNNGGTMYNQKFKGRVTISRDTSASTAYMELSSLTSEDTAVYYCTRAEAMDYWGQGTTVTVSSGGGGSGGGGSGGGGSDVVMTQSPLSLPVTLGQPASISCRSSESLVYRDGNTYLSWFHQRPGQSPRRLIYKVSNRDSGVPDRFSGSGSGTEFTLKISRVEAEDVGVYYCMQHTFWPWTFGQGTKVDIKSGGGGSEVQLVESGGGLVQPGGSLKLSCAASGFTFNKYAMNWVRQAPGKGLEWVARIRSKYNNYATYYADSVKDRFTISRDDSKNTAYLQMNNLKTEDTAVYYCVRHGNFGNSYISYWAYWGQGTLVTVSSGGGGSGGGGSGGGGSQTVVTQEPSLTVSPGGTVTLTCGSSTGAVTSGYYPNWVQQKPGQAPRGLIGGTKFLAPGTPARFSGSLLGGKAALTLSGVQPEDEAEYYCALWYSNRWVFGGGTKLTVL

SEQ ID NO: 644 - DNA, 1491 bp, Artificial
  unknown organism
caggtgcagctggtccagtctggagctgaagtgaagaagcctggggcttcagtgaagatatcctgcaagacttctggatacacattcactgaatacaccatacactgggtgaggcaggctcctggacagagacttgagtggatgggaggtattgatcctaacaatggtggtaccatgtataaccaaaaattcaagggcagggtcacaataagtcgtgacacgtctgccagcacagcctacatggagctgagcagtctgacgtctgaggatactgcagtctattactgcacaagagcagaggctatggactactggggtcaaggaaccacggtcaccgtctcctcaggtggtggtggttctggcggcggcggctccggtggtggtggttctgatgtcgtgatgactcagtctccactctccctgcccgtcacccttggacagccggcctccatctcctgcaggtctagtgaaagtctcgtttacagggatggaaacacgtacttgagttggtttcaccagaggcccggccaatctccaaggcgcctaatttataaggtctctaaccgggactctggggtcccagacagattcagcggcagtgggtcaggcactgagttcacactgaaaatcagcagggtggaggctgaggatgttggggtttattactgcatgcaacatacattctggccttggactttcggccaagggaccaaagtggatatcaaatccggaggtggtggatccgaggtgcagctggtcgagtctggaggaggattggtgcagcctggagggtcattgaaactctcatgtgcagcctctggattcaccttcaataagtacgccatgaactgggtccgccaggctccaggaaagggtttggaatgggttgctcgcataagaagtaaatataataattatgcaacatattatgccgattcagtgaaagacaggttcaccatctccagagatgattcaaaaaacactgcctatctacaaatgaacaacttgaaaactgaggacactgccgtgtactactgtgtgagacatgggaacttcggtaatagctacatatcctactgggcttactggggccaagggactctggtcaccgtctcctcaggtggtggtggttctggcggcggcggctccggtggtggtggttctcagactgttgtgactcaggaaccttcactcaccgtatcacctggtggaacagtcacactcacttgtggctcctcgactggggctgttacatctggctactacccaaactgggtccaacaaaaaccaggtcaggcaccccgtggtctaataggtgggactaagttcctcgcccccggtactcctgccagattctcaggctccctgcttggaggcaaggctgccctcaccctctcaggggtacagccagaggatgaggcagaatattactgtgctctatggtacagcaaccgctgggtgttcggtggaggaaccaaactgactgtccta

SEQ ID NO: 645 - protein, 497 aa, Artificial
  unknown organism
QVQLVQSGAEVKKPGASVKISCKTSGYTFTEYTIHWVRQAPGQRLEWMGGIDPNNGGTMYNQKFKGRVTISRDTSASTAYMELSSLTSEDTAVYYCTRAEAMDYWGQGTTVTVSSGGGGSGGGGSGGGGSDVVMTQSPLSLPVTLGQPASISCRSSESLVYRDGNTYLSWFHQRPGQSPRRLIYKVSNRDSGVPDRFSGSGSGTEFTLKISRVEAEDVGVYYCMQHTFWPWTFGQGTKVDIKSGGGGSEVQLVESGGGLVQPGGSLKLSCAASGFTFNSYAMNWVRQAPGKGLEWVARIRSKYNNYATYYADSVKGRFTISRDDSKNTAYLQMNNLKTEDTAVYYCVRHGNFGNSYVSWWAYWGQGTLVTVSSGGGGSGGGGSGGGGSQTVVTQEPSLTVSPGGTVTLTCGSSTGAVTSGNYPNWVQQKPGQAPRGLIGGTKFLAPGTPARFSGSLLGGKAALTLSGVQPEDEAEYYCVLWYSNRWVFGGGTKLTVL

SEQ ID NO: 646 - DNA, 1491 bp, Artificial
  unknown organism
caggtgcagctggtccagtctggagctgaagtgaagaagcctggggcttcagtgaagatatcctgcaagacttctggatacacattcactgaatacaccatacactgggtgaggcaggctcctggacagagacttgagtggatgggaggtattgatcctaacaatggtggtaccatgtataaccaaaaattcaagggcagggtcacaataagtcgtgacacgtctgccagcacagcctacatggagctgagcagtctgacgtctgaggatactgcagtctattactgcacaagagcagaggctatggactactggggtcaaggaaccacggtcaccgtctcctcaggtggtggtggttctggcggcggcggctccggtggtggtggttctgatgtcgtgatgactcagtctccactctccctgcccgtcacccttggacagccggcctccatctcctgcaggtctagtgaaagtctcgtttacagggatggaaacacgtacttgagttggtttcaccagaggcccggccaatctccaaggcgcctaatttataaggtctctaaccgggactctggggtcccagacagattcagcggcagtgggtcaggcactgagttcacactgaaaatcagcagggtggaggctgaggatgttggggtttattactgcatgcaacatacattctggccttggactttcggccaagggaccaaagtggatatcaaatccggaggtggtggatccgaggtgcagctggtcgagtctggaggaggattggtgcagcctggagggtcattgaaactctcatgtgcagcctctggattcaccttcaatagctacgccatgaactgggtccgccaggctccaggaaagggtttggaatgggttgctcgcataagaagtaaatataataattatgcaacatattatgccgattcagtgaaaggcaggttcaccatctccagagatgattcaaaaaacactgcctatctacaaatgaacaacttgaaaactgaggacactgccgtgtactactgtgtgagacatgggaacttcggtaatagctacgtttcctggtgggcttactggggccaagggactctggtcaccgtctcctcaggtggtggtggttctggcggcggcggctccggtggtggtggttctcagactgttgtgactcaggaaccttcactcaccgtatcacctggtggaacagtcacactcacttgtggctcctcgactggggctgttacatctggcaactacccaaactgggtccaacaaaaaccaggtcaggcaccccgtggtctaataggtgggactaagttcctcgcccccggtactcctgccagattctcaggctccctgcttggaggcaaggctgccctcaccctctcaggggtacagccagaggatgaggcagaatattactgtgttctatggtacagcaaccgctgggtgttcggtggaggaaccaaactgactgtccta

SEQ ID NO: 647 - protein, 497 aa, Artificial
  unknown organism
QVQLVQSGAEVKKPGASVKISCKTSGYTFTEYTIHWVRQAPGQRLEWMGGIDPNNGGTMYNQKFKGRVTISRDTSASTAYMELSSLTSEDTAVYYCTRAEAMDYWGQGTTVTVSSGGGGSGGGGSGGGGSDVVMTQSPLSLPVTLGQPASISCRSSESLVYRDGNTYLSWFHQRPGQSPRRLIYKVSNRDSGVPDRFSGSGSGTEFTLKISRVEAEDVGVYYCMQHTFWPWTFGQGTKVDIKSGGGGSEVQLVESGGGLVQPGGSLKLSCAASGFTFNKYAMNWVRQAPGKGLEWVARIRSKYNNYATYYADSVKDRFTISRDDSKNTAYLQMNNLKTEDTAVYYCVRHGNFGNSYISYWAYWGQGTLVTVSSGGGGSGGGGSGGGGSQTVVTQEPSLTVSPGGTVTLTCGSSTGAVTSGNYPNWVQQKPGQAPRGLIGGTKFLAPGTPARFSGSLLGGKAALTLSGVQPEDEAEYYCVLWYSNRWVFGGGTKLTVL

SEQ ID NO: 648 - DNA, 1491 bp, Artificial
  unknown organism
caggtgcagctggtccagtctggagctgaagtgaagaagcctggggcttcagtgaagatatcctgcaagacttctggatacacattcactgaatacaccatacactgggtgaggcaggctcctggacagagacttgagtggatgggaggtattgatcctaacaatggtggtaccatgtataaccaaaaattcaagggcagggtcacaataagtcgtgacacgtctgccagcacagcctacatggagctgagcagtctgacgtctgaggatactgcagtctattactgcacaagagcagaggctatggactactggggtcaaggaaccacggtcaccgtctcctcaggtggtggtggttctggcggcggcggctccggtggtggtggttctgatgtcgtgatgactcagtctccactctccctgcccgtcacccttggacagccggcctccatctcctgcaggtctagtgaaagtctcgtttacagggatggaaacacgtacttgagttggtttcaccagaggcccggccaatctccaaggcgcctaatttataaggtctctaaccgggactctggggtcccagacagattcagcggcagtgggtcaggcactgagttcacactgaaaatcagcagggtggaggctgaggatgttggggtttattactgcatgcaacatacattctggccttggactttcggccaagggaccaaagtggatatcaaatccggaggtggtggatccgaggtgcagctggtcgagtctggaggaggattggtgcagcctggagggtcattgaaactctcatgtgcagcctctggattcaccttcaataagtacgccatgaactgggtccgccaggctccaggaaagggtttggaatgggttgctcgcataagaagtaaatataataattatgcaacatattatgccgattcagtgaaagacaggttcaccatctccagagatgattcaaaaaacactgcctatctacaaatgaacaacttgaaaactgaggacactgccgtgtactactgtgtgagacatgggaacttcggtaatagctacatatcctactgggcttactggggccaagggactctggtcaccgtctcctcaggtggtggtggttctggcggcggcggctccggtggtggtggttctcagactgttgtgactcaggaaccttcactcaccgtatcacctggtggaacagtcacactcacttgtggctcctcgactggggctgttacatctggcaactacccaaactgggtccaacaaaaaccaggtcaggcaccccgtggtctaataggtgggactaagttcctcgcccccggtactcctgccagattctcaggctccctgcttggaggcaaggctgccctcaccctctcaggggtacagccagaggatgaggcagaatattactgtgttctatggtacagcaaccgctgggtgttcggtggaggaaccaaactgactgtccta

SEQ ID NO: 649 - protein, 115 aa, Artificial
  unknown organism
QVQLVQSGAEVKKPGASVKISCKTSGYTFTEYTIHWVRQAPGKRLEWIGGIDPNNGGTMYNQKFKGRVTLTRDTSASTAYMELSSLRSEDTAVYYCTRAEAMDYWGQGTTVTVSS

SEQ ID NO: 650 - protein, 5 aa, Artificial
  unknown organism
EYTIH

SEQ ID NO: 651 - protein, 17 aa, Artificial
  unknown organism
GIDPNNGGTMYNQKFKG

SEQ ID NO: 652 - protein, 6 aa, Artificial
  unknown organism
AEAMDY

SEQ ID NO: 653 - DNA, 345 bp, Artificial
  unknown organism
caggtgcagctggtccagtctggagctgaagtgaagaagcctggggcttcagtgaagatatcctgcaagacttctggatacacattcactgaatacaccatacactgggtgaggcaggctcctggaaagagacttgagtggattggaggtattgatcctaacaatggtggtaccatgtataaccaaaaattcaagggcagggtcacattaactcgtgacacgtctgccagcacagcctacatggagctgagcagtctgaggtctgaggatactgcagtctattactgcacaagagcagaggctatggactactggggtcaaggaaccacggtcaccgtctcctca

SEQ ID NO: 654 - protein, 112 aa, Artificial; identical to SEQ ID NO: 619
  unknown organism

SEQ ID NO: 655 - protein, 16 aa, Artificial
  unknown organism
RSSESLVYRDGNTYLS

SEQ ID NO: 656 - protein, 7 aa, Artificial
  unknown organism
KVSNRDS

SEQ ID NO: 657 - protein, 9 aa, Artificial
  unknown organism
MQHTFWPWT

SEQ ID NO: 658 - DNA, 336 bp, Artificial; identical to SEQ ID NO: 623
  unknown organism

SEQ ID NO: 659 - protein, 242 aa, Artificial
  unknown organism
QVQLVQSGAEVKKPGASVKISCKTSGYTFTEYTIHWVRQAPGKRLEWIGGIDPNNGGTMYNQKFKGRVTLTRDTSASTAYMELSSLRSEDTAVYYCTRAEAMDYWGQGTTVTVSSGGGGSGGGGSGGGGSDVVMTQSPLSLPVTLGQPASISCRSSESLVYRDGNTYLSWFHQRPGQSPRRLIYKVSNRDSGVPDRFSGSGSGTEFTLKISRVEAEDVGVYYCMQHTFWPWTFGQGTKVDIK

SEQ ID NO: 660 - DNA, 726 bp, Artificial
  unknown organism
caggtgcagctggtccagtctggagctgaagtgaagaagcctggggcttcagtgaagatatcctgcaagacttctggatacacattcactgaatacaccatacactgggtgaggcaggctcctggaaagagacttgagtggattggaggtattgatcctaacaatggtggtaccatgtataaccaaaaattcaagggcagggtcacattaactcgtgacacgtctgccagcacagcctacatggagctgagcagtctgaggtctgaggatactgcagtctattactgcacaagagcagaggctatggactactggggtcaaggaaccacggtcaccgtctcctcaggtggtggtggttctggcggcggcggctccggtggtggtggttctgatgtcgtgatgactcagtctccactctccctgcccgtcacccttggacagccggcctccatctcctgcaggtctagtgaaagtctcgtttacagggatggaaacacgtacttgagttggtttcaccagaggcccggccaatctccaaggcgcctaatttataaggtctctaaccgggactctggggtcccagacagattcagcggcagtgggtcaggcactgagttcacactgaaaatcagcagggtggaggctgaggatgttggggtttattactgcatgcaacatacattctggccttggactttcggccaagggaccaaagtggatatcaaa

SEQ ID NO: 661 - protein, 497 aa, Artificial
  unknown organism
QVQLVQSGAEVKKPGASVKISCKTSGYTFTEYTIHWVRQAPGKRLEWIGGIDPNNGGTMYNQKFKGRVTLTRDTSASTAYMELSSLRSEDTAVYYCTRAEAMDYWGQGTTVTVSSGGGGSGGGGSGGGGSDVVMTQSPLSLPVTLGQPASISCRSSESLVYRDGNTYLSWFHQRPGQSPRRLIYKVSNRDSGVPDRFSGSGSGTEFTLKISRVEAEDVGVYYCMQHTFWPWTFGQGTKVDIKSGGGGSEVQLVESGGGLVQPGGSLKLSCAASGFTFNKYAMNWVRQAPGKGLEWVARIRSKYNNYATYYADSVKDRFTISRDDSKNTAYLQMNNLKTEDTAVYYCVRHGNFGNSYISYWAYWGQGTLVTVSSGGGGSGGGGSGGGGSQTVVTQEPSLTVSPGGTVTLTCGSSTGAVTSGYYPNWVQQKPGQAPRGLIGGTKFLAPGTPARFSGSLLGGKAALTLSGVQPEDEAEYYCALWYSNRWVFGGGTKLTVL

SEQ ID NO: 662 - DNA, 1491 bp, Artificial
  unknown organism
caggtgcagctggtccagtctggagctgaagtgaagaagcctggggcttcagtgaagatatcctgcaagacttctggatacacattcactgaatacaccatacactgggtgaggcaggctcctggaaagagacttgagtggattggaggtattgatcctaacaatggtggtaccatgtataaccaaaaattcaagggcagggtcacattaactcgtgacacgtctgccagcacagcctacatggagctgagcagtctgaggtctgaggatactgcagtctattactgcacaagagcagaggctatggactactggggtcaaggaaccacggtcaccgtctcctcaggtggtggtggttctggcggcggcggctccggtggtggtggttctgatgtcgtgatgactcagtctccactctccctgcccgtcacccttggacagccggcctccatctcctgcaggtctagtgaaagtctcgtttacagggatggaaacacgtacttgagttggtttcaccagaggcccggccaatctccaaggcgcctaatttataaggtctctaaccgggactctggggtcccagacagattcagcggcagtgggtcaggcactgagttcacactgaaaatcagcagggtggaggctgaggatgttggggtttattactgcatgcaacatacattctggccttggactttcggccaagggaccaaagtggatatcaaatccggaggtggtggatccgaggtgcagctggtcgagtctggaggaggattggtgcagcctggagggtcattgaaactctcatgtgcagcctctggattcaccttcaataagtacgccatgaactgggtccgccaggctccaggaaagggtttggaatgggttgctcgcataagaagtaaatataataattatgcaacatattatgccgattcagtgaaagacaggttcaccatctccagagatgattcaaaaaacactgcctatctacaaatgaacaacttgaaaactgaggacactgccgtgtactactgtgtgagacatgggaacttcggtaatagctacatatcctactgggcttactggggccaagggactctggtcaccgtctcctcaggtggtggtggttctggcggcggcggctccggtggtggtggttctcagactgttgtgactcaggaaccttcactcaccgtatcacctggtggaacagtcacactcacttgtggctcctcgactggggctgttacatctggctactacccaaactgggtccaacaaaaaccaggtcaggcaccccgtggtctaataggtgggactaagttcctcgcccccggtactcctgccagattctcaggctccctgcttggaggcaaggctgccctcaccctctcaggggtacagccagaggatgaggcagaatattactgtgctctatggtacagcaaccgctgggtgttcggtggaggaaccaaactgactgtccta

SEQ ID NO: 663 - protein, 497 aa, Artificial
  unknown organism
QVQLVQSGAEVKKPGASVKISCKTSGYTFTEYTIHWVRQAPGKRLEWIGGIDPNNGGTMYNQKFKGRVTLTRDTSASTAYMELSSLRSEDTAVYYCTRAEAMDYWGQGTTVTVSSGGGGSGGGGSGGGGSDVVMTQSPLSLPVTLGQPASISCRSSESLVYRDGNTYLSWFHQRPGQSPRRLIYKVSNRDSGVPDRFSGSGSGTEFTLKISRVEAEDVGVYYCMQHTFWPWTFGQGTKVDIKSGGGGSEVQLVESGGGLVQPGGSLKLSCAASGFTFNSYAMNWVRQAPGKGLEWVARIRSKYNNYATYYADSVKGRFTISRDDSKNTAYLQMNNLKTEDTAVYYCVRHGNFGNSYVSWWAYWGQGTLVTVSSGGGGSGGGGSGGGGSQTVVTQEPSLTVSPGGTVTLTCGSSTGAVTSGNYPNWVQQKPGQAPRGLIGGTKFLAPGTPARFSGSLLGGKAALTLSGVQPEDEAEYYCVLWYSNRWVFGGGTKLTVL

SEQ ID NO: 664 - DNA, 1491 bp, Artificial
  unknown organism
caggtgcagctggtccagtctggagctgaagtgaagaagcctggggcttcagtgaagatatcctgcaagacttctggatacacattcactgaatacaccatacactgggtgaggcaggctcctggaaagagacttgagtggattggaggtattgatcctaacaatggtggtaccatgtataaccaaaaattcaagggcagggtcacattaactcgtgacacgtctgccagcacagcctacatggagctgagcagtctgaggtctgaggatactgcagtctattactgcacaagagcagaggctatggactactggggtcaaggaaccacggtcaccgtctcctcaggtggtggtggttctggcggcggcggctccggtggtggtggttctgatgtcgtgatgactcagtctccactctccctgcccgtcacccttggacagccggcctccatctcctgcaggtctagtgaaagtctcgtttacagggatggaaacacgtacttgagttggtttcaccagaggcccggccaatctccaaggcgcctaatttataaggtctctaaccgggactctggggtcccagacagattcagcggcagtgggtcaggcactgagttcacactgaaaatcagcagggtggaggctgaggatgttggggtttattactgcatgcaacatacattctggccttggactttcggccaagggaccaaagtggatatcaaatccggaggtggtggatccgaggtgcagctggtcgagtctggaggaggattggtgcagcctggagggtcattgaaactctcatgtgcagcctctggattcaccttcaatagctacgccatgaactgggtccgccaggctccaggaaagggtttggaatgggttgctcgcataagaagtaaatataataattatgcaacatattatgccgattcagtgaaaggcaggttcaccatctccagagatgattcaaaaaacactgcctatctacaaatgaacaacttgaaaactgaggacactgccgtgtactactgtgtgagacatgggaacttcggtaatagctacgtttcctggtgggcttactggggccaagggactctggtcaccgtctcctcaggtggtggtggttctggcggcggcggctccggtggtggtggttctcagactgttgtgactcaggaaccttcactcaccgtatcacctggtggaacagtcacactcacttgtggctcctcgactggggctgttacatctggcaactacccaaactgggtccaacaaaaaccaggtcaggcaccccgtggtctaataggtgggactaagttcctcgcccccggtactcctgccagattctcaggctccctgcttggaggcaaggctgccctcaccctctcaggggtacagccagaggatgaggcagaatattactgtgttctatggtacagcaaccgctgggtgttcggtggaggaaccaaactgactgtccta

SEQ ID NO: 665 - protein, 497 aa, Artificial
  unknown organism
QVQLVQSGAEVKKPGASVKISCKTSGYTFTEYTIHWVRQAPGKRLEWIGGIDPNNGGTMYNQKFKGRVTLTRDTSASTAYMELSSLRSEDTAVYYCTRAEAMDYWGQGTTVTVSSGGGGSGGGGSGGGGSDVVMTQSPLSLPVTLGQPASISCRSSESLVYRDGNTYLSWFHQRPGQSPRRLIYKVSNRDSGVPDRFSGSGSGTEFTLKISRVEAEDVGVYYCMQHTFWPWTFGQGTKVDIKSGGGGSEVQLVESGGGLVQPGGSLKLSCAASGFTFNKYAMNWVRQAPGKGLEWVARIRSKYNNYATYYADSVKDRFTISRDDSKNTAYLQMNNLKTEDTAVYYCVRHGNFGNSYISYWAYWGQGTLVTVSSGGGGSGGGGSGGGGSQTVVTQEPSLTVSPGGTVTLTCGSSTGAVTSGNYPNWVQQKPGQAPRGLIGGTKFLAPGTPARFSGSLLGGKAALTLSGVQPEDEAEYYCVLWYSNRWVFGGGTKLTVL

SEQ ID NO: 666 - DNA, 1491 bp, Artificial
  unknown organism
caggtgcagctggtccagtctggagctgaagtgaagaagcctggggcttcagtgaagatatcctgcaagacttctggatacacattcactgaatacaccatacactgggtgaggcaggctcctggaaagagacttgagtggattggaggtattgatcctaacaatggtggtaccatgtataaccaaaaattcaagggcagggtcacattaactcgtgacacgtctgccagcacagcctacatggagctgagcagtctgaggtctgaggatactgcagtctattactgcacaagagcagaggctatggactactggggtcaaggaaccacggtcaccgtctcctcaggtggtggtggttctggcggcggcggctccggtggtggtggttctgatgtcgtgatgactcagtctccactctccctgcccgtcacccttggacagccggcctccatctcctgcaggtctagtgaaagtctcgtttacagggatggaaacacgtacttgagttggtttcaccagaggcccggccaatctccaaggcgcctaatttataaggtctctaaccgggactctggggtcccagacagattcagcggcagtgggtcaggcactgagttcacactgaaaatcagcagggtggaggctgaggatgttggggtttattactgcatgcaacatacattctggccttggactttcggccaagggaccaaagtggatatcaaatccggaggtggtggatccgaggtgcagctggtcgagtctggaggaggattggtgcagcctggagggtcattgaaactctcatgtgcagcctctggattcaccttcaataagtacgccatgaactgggtccgccaggctccaggaaagggtttggaatgggttgctcgcataagaagtaaatataataattatgcaacatattatgccgattcagtgaaagacaggttcaccatctccagagatgattcaaaaaacactgcctatctacaaatgaacaacttgaaaactgaggacactgccgtgtactactgtgtgagacatgggaacttcggtaatagctacatatcctactgggcttactggggccaagggactctggtcaccgtctcctcaggtggtggtggttctggcggcggcggctccggtggtggtggttctcagactgttgtgactcaggaaccttcactcaccgtatcacctggtggaacagtcacactcacttgtggctcctcgactggggctgttacatctggcaactacccaaactgggtccaacaaaaaccaggtcaggcaccccgtggtctaataggtgggactaagttcctcgcccccggtactcctgccagattctcaggctccctgcttggaggcaaggctgccctcaccctctcaggggtacagccagaggatgaggcagaatattactgtgttctatggtacagcaaccgctgggtgttcggtggaggaaccaaactgactgtccta

SEQ ID NO: 667 - protein, 115 aa, Artificial
  unknown organism
QVQLVQSGAEVKKPGASVKISCKASGYTFTEYTIQWVRQAPGERLEWIGGIDPNDGGTMYNQKFKGRVTLTRDTSASTAYMELRSLTSEDTAVYYCTRAEAMDYWGQGTTVTVSS

SEQ ID NO: 668 - protein, 5 aa, Artificial
  unknown organism
EYTIQ

SEQ ID NO: 669 - protein, 17 aa, Artificial
  unknown organism
GIDPNDGGTMYNQKFKG

SEQ ID NO: 670 - protein, 6 aa, Artificial
  unknown organism
AEAMDY

SEQ ID NO: 671 - DNA, 345 bp, Artificial
  unknown organism
caggtgcagctggtccagtctggagctgaagtgaagaagcctggggcttcagtgaagatatcctgcaaggcttctggatacacattcactgaatacaccatacaatgggtgaggcaggcccctggagagagacttgagtggattggaggtattgatcctaacgatggtggtaccatgtataaccaaaaattcaagggcagggtcacattaactcgtgacacgtctgccagcacagcctacatggagctgaggagtctgacgtctgaggatactgcagtctattactgcacaagagcagaggctatggactactggggtcaaggaaccacggtcaccgtctcctca

SEQ ID NO: 672 - protein, 112 aa, Artificial; identical to SEQ ID NO: 619
  unknown organism

SEQ ID NO: 673 - protein, 16 aa, Artificial
  unknown organism
RSSESLVYRDGNTYLS

SEQ ID NO: 674 - protein, 7 aa, Artificial
  unknown organism
KVSNRDS

SEQ ID NO: 675 - protein, 9 aa, Artificial
  unknown organism
MQHTFWPWT

SEQ ID NO: 676 - DNA, 336 bp, Artificial; identical to SEQ ID NO: 623
  unknown organism

SEQ ID NO: 677 - protein, 242 aa, Artificial
  unknown organism
QVQLVQSGAEVKKPGASVKISCKASGYTFTEYTIQWVRQAPGERLEWIGGIDPNDGGTMYNQKFKGRVTLTRDTSASTAYMELRSLTSEDTAVYYCTRAEAMDYWGQGTTVTVSSGGGGSGGGGSGGGGSDVVMTQSPLSLPVTLGQPASISCRSSESLVYRDGNTYLSWFHQRPGQSPRRLIYKVSNRDSGVPDRFSGSGSGTEFTLKISRVEAEDVGVYYCMQHTFWPWTFGQGTKVDIK

SEQ ID NO: 678 - DNA, 726 bp, Artificial
  unknown organism
caggtgcagctggtccagtctggagctgaagtgaagaagcctggggcttcagtgaagatatcctgcaaggcttctggatacacattcactgaatacaccatacaatgggtgaggcaggcccctggagagagacttgagtggattggaggtattgatcctaacgatggtggtaccatgtataaccaaaaattcaagggcagggtcacattaactcgtgacacgtctgccagcacagcctacatggagctgaggagtctgacgtctgaggatactgcagtctattactgcacaagagcagaggctatggactactggggtcaaggaaccacggtcaccgtctcctcaggtggtggtggttctggcggcggcggctccggtggtggtggttctgatgtcgtgatgactcagtctccactctccctgcccgtcacccttggacagccggcctccatctcctgcaggtctagtgaaagtctcgtttacagggatggaaacacgtacttgagttggtttcaccagaggcccggccaatctccaaggcgcctaatttataaggtctctaaccgggactctggggtcccagacagattcagcggcagtgggtcaggcactgagttcacactgaaaatcagcagggtggaggctgaggatgttggggtttattactgcatgcaacatacattctggccttggactttcggccaagggaccaaagtggatatcaaa

SEQ ID NO: 679 - protein, 497 aa, Artificial
  unknown organism
QVQLVQSGAEVKKPGASVKISCKASGYTFTEYTIQWVRQAPGERLEWIGGIDPNDGGTMYNQKFKGRVTLTRDTSASTAYMELRSLTSEDTAVYYCTRAEAMDYWGQGTTVTVSSGGGGSGGGGSGGGGSDVVMTQSPLSLPVTLGQPASISCRSSESLVYRDGNTYLSWFHQRPGQSPRRLIYKVSNRDSGVPDRFSGSGSGTEFTLKISRVEAEDVGVYYCMQHTFWPWTFGQGTKVDIKSGGGGSEVQLVESGGGLVQPGGSLKLSCAASGFTFNKYAMNWVRQAPGKGLEWVARIRSKYNNYATYYADSVKDRFTISRDDSKNTAYLQMNNLKTEDTAVYYCVRHGNFGNSYISYWAYWGQGTLVTVSSGGGGSGGGGSGGGGSQTVVTQEPSLTVSPGGTVTLTCGSSTGAVTSGNYPNWVQQKPGQAPRGLIGGTKFLAPGTPARFSGSLLGGKAALTLSGVQPEDEAEYYCVLWYSNRWVFGGGTKLTVL

SEQ ID NO: 680 - DNA, 1491 bp, Artificial
  unknown organism
caggtgcagctggtccagtctggagctgaagtgaagaagcctggggcttcagtgaagatatcctgcaaggcttctggatacacattcactgaatacaccatacaatgggtgaggcaggcccctggagagagacttgagtggattggaggtattgatcctaacgatggtggtaccatgtataaccaaaaattcaagggcagggtcacattaactcgtgacacgtctgccagcacagcctacatggagctgaggagtctgacgtctgaggatactgcagtctattactgcacaagagcagaggctatggactactggggtcaaggaaccacggtcaccgtctcctcaggtggtggtggttctggcggcggcggctccggtggtggtggttctgatgtcgtgatgactcagtctccactctccctgcccgtcacccttggacagccggcctccatctcctgcaggtctagtgaaagtctcgtttacagggatggaaacacgtacttgagttggtttcaccagaggcccggccaatctccaaggcgcctaatttataaggtctctaaccgggactctggggtcccagacagattcagcggcagtgggtcaggcactgagttcacactgaaaatcagcagggtggaggctgaggatgttggggtttattactgcatgcaacatacattctggccttggactttcggccaagggaccaaagtggatatcaaatccggaggtggtggatccgaggtgcagctggtcgagtctggaggaggattggtgcagcctggagggtcattgaaactctcatgtgcagcctctggattcaccttcaataagtacgccatgaactgggtccgccaggctccaggaaagggtttggaatgggttgctcgcataagaagtaaatataataattatgcaacatattatgccgattcagtgaaagacaggttcaccatctccagagatgattcaaaaaacactgcctatctacaaatgaacaacttgaaaactgaggacactgccgtgtactactgtgtgagacatgggaacttcggtaatagctacatatcctactgggcttactggggccaagggactctggtcaccgtctcctcaggtggtggtggttctggcggcggcggctccggtggtggtggttctcagactgttgtgactcaggaaccttcactcaccgtatcacctggtggaacagtcacactcacttgtggctcctcgactggggctgttacatctggcaactacccaaactgggtccaacaaaaaccaggtcaggcaccccgtggtctaataggtgggactaagttcctcgcccccggtactcctgccagattctcaggctccctgcttggaggcaaggctgccctcaccctctcaggggtacagccagaggatgaggcagaatattactgtgttctatggtacagcaaccgctgggtgttcggtggaggaaccaaactgactgtccta

SEQ ID NO: 681 - protein, 115 aa, Artificial
  unknown organism
QVQLVQSGAEVKKPGASVKVSCKTSGYTFTEYTIHWVRQAPGKRLEWIGGIDPSSGGTMYNQKFKGWVTLTRDTSASTAYMELRSLRSEDTAVYYCTRAEAMDYWGQGTTVTVSS

SEQ ID NO: 682 - protein, 5 aa, Artificial
  unknown organism
EYTIH

SEQ ID NO: 683 - protein, 17 aa, Artificial
  unknown organism
GIDPSSGGTMYNQKFKG

SEQ ID NO: 684 - protein, 6 aa, Artificial
  unknown organism
AEAMDY

SEQ ID NO: 685 - DNA, 345 bp, Artificial
  unknown organism
caggtgcagctggtccagtctggagctgaagtgaagaagcctggggcttcagtgaaggtatcctgcaagacttctggatacacattcactgaatacaccatacactgggtgaggcaggcccctggaaagagactagagtggattggaggtattgatcctagcagtggtggtaccatgtataaccaaaaattcaagggctgggtcacattaactcgtgacacgtctgccagcacagcctacatggagctgaggagtctgaggtctgaggatactgcagtctattactgcacaagagcagaggctatggactactggggtcaaggaaccacggtcaccgtctcctca

SEQ ID NO: 686 - protein, 112 aa, Artificial; identical to SEQ ID NO: 619
  unknown organism

SEQ ID NO: 687 - protein, 16 aa, Artificial
  unknown organism
RSSESLVYRDGNTYLS

SEQ ID NO: 688 - protein, 7 aa, Artificial
  unknown organism
KVSNRDS

SEQ ID NO: 689 - protein, 9 aa, Artificial
  unknown organism
MQHTFWPWT

SEQ ID NO: 690 - DNA, 336 bp, Artificial; identical to SEQ ID NO: 623
  unknown organism

SEQ ID NO: 691 - protein, 242 aa, Artificial
  unknown organism
QVQLVQSGAEVKKPGASVKVSCKTSGYTFTEYTIHWVRQAPGKRLEWIGGIDPSSGGTMYNQKFKGWVTLTRDTSASTAYMELRSLRSEDTAVYYCTRAEAMDYWGQGTTVTVSSGGGGSGGGGSGGGGSDVVMTQSPLSLPVTLGQPASISCRSSESLVYRDGNTYLSWFHQRPGQSPRRLIYKVSNRDSGVPDRFSGSGSGTEFTLKISRVEAEDVGVYYCMQHTFWPWTFGQGTKVDIK

SEQ ID NO: 692 - DNA, 726 bp, Artificial
  unknown organism
caggtgcagctggtccagtctggagctgaagtgaagaagcctggggcttcagtgaaggtatcctgcaagacttctggatacacattcactgaatacaccatacactgggtgaggcaggcccctggaaagagactagagtggattggaggtattgatcctagcagtggtggtaccatgtataaccaaaaattcaagggctgggtcacattaactcgtgacacgtctgccagcacagcctacatggagctgaggagtctgaggtctgaggatactgcagtctattactgcacaagagcagaggctatggactactggggtcaaggaaccacggtcaccgtctcctcaggtggtggtggttctggcggcggcggctccggtggtggtggttctgatgtcgtgatgactcagtctccactctccctgcccgtcacccttggacagccggcctccatctcctgcaggtctagtgaaagtctcgtttacagggatggaaacacgtacttgagttggtttcaccagaggcccggccaatctccaaggcgcctaatttataaggtctctaaccgggactctggggtcccagacagattcagcggcagtgggtcaggcactgagttcacactgaaaatcagcagggtggaggctgaggatgttggggtttattactgcatgcaacatacattctggccttggactttcggccaagggaccaaagtggatatcaaa

SEQ ID NO: 693 - protein, 497 aa, Artificial
  unknown organism
QVQLVQSGAEVKKPGASVKVSCKTSGYTFTEYTIHWVRQAPGKRLEWIGGIDPSSGGTMYNQKFKGWVTLTRDTSASTAYMELRSLRSEDTAVYYCTRAEAMDYWGQGTTVTVSSGGGGSGGGGSGGGGSDVVMTQSPLSLPVTLGQPASISCRSSESLVYRDGNTYLSWFHQRPGQSPRRLIYKVSNRDSGVPDRFSGSGSGTEFTLKISRVEAEDVGVYYCMQHTFWPWTFGQGTKVDIKSGGGGSEVQLVESGGGLVQPGGSLKLSCAASGFTFNKYAMNWVRQAPGKGLEWVARIRSKYNNYATYYADSVKDRFTISRDDSKNTAYLQMNNLKTEDTAVYYCVRHGNFGNSYISYWAYWGQGTLVTVSSGGGGSGGGGSGGGGSQTVVTQEPSLTVSPGGTVTLTCGSSTGAVTSGNYPNWVQQKPGQAPRGLIGGTKFLAPGTPARFSGSLLGGKAALTLSGVQPEDEAEYYCVLWYSNRWVFGGGTKLTVL

SEQ ID NO: 694 - DNA, 1491 bp, Artificial
  unknown organism
caggtgcagctggtccagtctggagctgaagtgaagaagcctggggcttcagtgaaggtatcctgcaagacttctggatacacattcactgaatacaccatacactgggtgaggcaggcccctggaaagagactagagtggattggaggtattgatcctagcagtggtggtaccatgtataaccaaaaattcaagggctgggtcacattaactcgtgacacgtctgccagcacagcctacatggagctgaggagtctgaggtctgaggatactgcagtctattactgcacaagagcagaggctatggactactggggtcaaggaaccacggtcaccgtctcctcaggtggtggtggttctggcggcggcggctccggtggtggtggttctgatgtcgtgatgactcagtctccactctccctgcccgtcacccttggacagccggcctccatctcctgcaggtctagtgaaagtctcgtttacagggatggaaacacgtacttgagttggtttcaccagaggcccggccaatctccaaggcgcctaatttataaggtctctaaccgggactctggggtcccagacagattcagcggcagtgggtcaggcactgagttcacactgaaaatcagcagggtggaggctgaggatgttggggtttattactgcatgcaacatacattctggccttggactttcggccaagggaccaaagtggatatcaaatccggaggtggtggatccgaggtgcagctggtcgagtctggaggaggattggtgcagcctggagggtcattgaaactctcatgtgcagcctctggattcaccttcaataagtacgccatgaactgggtccgccaggctccaggaaagggtttggaatgggttgctcgcataagaagtaaatataataattatgcaacatattatgccgattcagtgaaagacaggttcaccatctccagagatgattcaaaaaacactgcctatctacaaatgaacaacttgaaaactgaggacactgccgtgtactactgtgtgagacatgggaacttcggtaatagctacatatcctactgggcttactggggccaagggactctggtcaccgtctcctcaggtggtggtggttctggcggcggcggctccggtggtggtggttctcagactgttgtgactcaggaaccttcactcaccgtatcacctggtggaacagtcacactcacttgtggctcctcgactggggctgttacatctggcaactacccaaactgggtccaacaaaaaccaggtcaggcaccccgtggtctaataggtgggactaagttcctcgcccccggtactcctgccagattctcaggctccctgcttggaggcaaggctgccctcaccctctcaggggtacagccagaggatgaggcagaatattactgtgttctatggtacagcaaccgctgggtgttcggtggaggaaccaaactgactgtccta

SEQ ID NO: 695 - protein, 115 aa, Artificial
  unknown organism
QVQLVQSGAEVKKPGASVKISCKTSGYTFTEYTIHWVRQAPGKRLEWIGGIDPNNGGTMYNQKFKGWVTLTRDTSASTAYMELSSLRSEDTAVYYCTRAEAMDYWGQGTTVTVSS

SEQ ID NO: 696 - protein, 5 aa, Artificial
  unknown organism
EYTIH

SEQ ID NO: 697 - protein, 17 aa, Artificial
  unknown organism
GIDPNNGGTMYNQKFKG

SEQ ID NO: 698 - protein, 6 aa, Artificial
  unknown organism
AEAMDY

SEQ ID NO: 699 - DNA, 345 bp, Artificial
  unknown organism
caggtgcagctggtccagtctggagctgaagtgaagaagcctggggcttcagtgaagatatcctgcaagacttctggatacacattcactgaatacaccatacactgggtgaggcaggcccctggaaagagacttgagtggattggaggtattgatcctaacaatggtggtaccatgtataaccaaaaattcaagggctgggtcacattaactcgtgacacgtctgccagcacagcctacatggagctgagcagtctgaggtctgaggatactgcagtctattactgcacaagagcagaggctatggactactggggtcaaggaaccacggtcaccgtctcctca

SEQ ID NO: 700 - protein, 112 aa, Artificial
  unknown organism
DVVMTQSPLSLPVTLGQPASISCRSSESLVYRDGSTYLSWFHQRPGQSPRRLIYKVSNRDSGVPDRFSGSGSGTEFTLKISRVEAEDVGVYYCMQHTFWPWTFGQGTKVDIK

SEQ ID NO: 701 - protein, 16 aa, Artificial
  unknown organism
RSSESLVYRDGSTYLS

SEQ ID NO: 702 - protein, 7 aa, Artificial
  unknown organism
KVSNRDS

SEQ ID NO: 703 - protein, 9 aa, Artificial
  unknown organism
MQHTFWPWT

SEQ ID NO: 704 - DNA, 336 bp, Artificial
  unknown organism
gatgtcgtgatgactcagtctccactctccctgcccgtcacccttggacagccggcctccatctcctgcaggtctagtgaaagtctcgtttacagggatggaagcacgtacttgagttggtttcaccagaggcccggccaatccccaaggcgcctaatttataaggtctctaaccgggactctggggtcccagacagattcagcggcagtgggtcaggcactgagttcacactgaaaatcagcagggtggaggctgaggatgttggggtttattactgcatgcaacatacattctggccttggactttcggccaagggaccaaagtggatatcaaa

SEQ ID NO: 705 - protein, 242 aa, Artificial
  unknown organism
QVQLVQSGAEVKKPGASVKISCKTSGYTFTEYTIHWVRQAPGKRLEWIGGIDPNNGGTMYNQKFKGWVTLTRDTSASTAYMELSSLRSEDTAVYYCTRAEAMDYWGQGTTVTVSSGGGGSGGGGSGGGGSDVVMTQSPLSLPVTLGQPASISCRSSESLVYRDGSTYLSWFHQRPGQSPRRLIYKVSNRDSGVPDRFSGSGSGTEFTLKISRVEAEDVGVYYCMQHTFWPWTFGQGTKVDIK

SEQ ID NO: 706 - DNA, 726 bp, Artificial
  unknown organism
caggtgcagctggtccagtctggagctgaagtgaagaagcctggggcttcagtgaagatatcctgcaagacttctggatacacattcactgaatacaccatacactgggtgaggcaggcccctggaaagagacttgagtggattggaggtattgatcctaacaatggtggtaccatgtataaccaaaaattcaagggctgggtcacattaactcgtgacacgtctgccagcacagcctacatggagctgagcagtctgaggtctgaggatactgcagtctattactgcacaagagcagaggctatggactactggggtcaaggaaccacggtcaccgtctcctcaggtggtggtggttctggcggcggcggctccggtggtggtggttctgatgtcgtgatgactcagtctccactctccctgcccgtcacccttggacagccggcctccatctcctgcaggtctagtgaaagtctcgtttacagggatggaagcacgtacttgagttggtttcaccagaggcccggccaatccccaaggcgcctaatttataaggtctctaaccgggactctggggtcccagacagattcagcggcagtgggtcaggcactgagttcacactgaaaatcagcagggtggaggctgaggatgttggggtttattactgcatgcaacatacattctggccttggactttcggccaagggaccaaagtggatatcaaa

SEQ ID NO: 707 - protein, 497 aa, Artificial
  unknown organism
QVQLVQSGAEVKKPGASVKISCKTSGYTFTEYTIHWVRQAPGKRLEWIGGIDPNNGGTMYNQKFKGWVTLTRDTSASTAYMELSSLRSEDTAVYYCTRAEAMDYWGQGTTVTVSSGGGGSGGGGSGGGGSDVVMTQSPLSLPVTLGQPASISCRSSESLVYRDGSTYLSWFHQRPGQSPRRLIYKVSNRDSGVPDRFSGSGSGTEFTLKISRVEAEDVGVYYCMQHTFWPWTFGQGTKVDIKSGGGGSEVQLVESGGGLVQPGGSLKLSCAASGFTFNKYAMNWVRQAPGKGLEWVARIRSKYNNYATYYADSVKDRFTISRDDSKNTAYLQMNNLKTEDTAVYYCVRHGNFGNSYISYWAYWGQGTLVTVSSGGGGSGGGGSGGGGSQTVVTQEPSLTVSPGGTVTLTCGSSTGAVTSGNYPNWVQQKPGQAPRGLIGGTKFLAPGTPARFSGSLLGGKAALTLSGVQPEDEAEYYCVLWYSNRWVFGGGTKLTVL

SEQ ID NO: 708 - DNA, 1491 bp, Artificial
  unknown organism
caggtgcagctggtccagtctggagctgaagtgaagaagcctggggcttcagtgaagatatcctgcaagacttctggatacacattcactgaatacaccatacactgggtgaggcaggcccctggaaagagacttgagtggattggaggtattgatcctaacaatggtggtaccatgtataaccaaaaattcaagggctgggtcacattaactcgtgacacgtctgccagcacagcctacatggagctgagcagtctgaggtctgaggatactgcagtctattactgcacaagagcagaggctatggactactggggtcaaggaaccacggtcaccgtctcctcaggtggtggtggttctggcggcggcggctccggtggtggtggttctgatgtcgtgatgactcagtctccactctccctgcccgtcacccttggacagccggcctccatctcctgcaggtctagtgaaagtctcgtttacagggatggaagcacgtacttgagttggtttcaccagaggcccggccaatccccaaggcgcctaatttataaggtctctaaccgggactctggggtcccagacagattcagcggcagtgggtcaggcactgagttcacactgaaaatcagcagggtggaggctgaggatgttggggtttattactgcatgcaacatacattctggccttggactttcggccaagggaccaaagtggatatcaaatccggaggtggtggatccgaggtgcagctggtcgagtctggaggaggattggtgcagcctggagggtcattgaaactctcatgtgcagcctctggattcaccttcaataagtacgccatgaactgggtccgccaggctccaggaaagggtttggaatgggttgctcgcataagaagtaaatataataattatgcaacatattatgccgattcagtgaaagacaggttcaccatctccagagatgattcaaaaaacactgcctatctacaaatgaacaacttgaaaactgaggacactgccgtgtactactgtgtgagacatgggaacttcggtaatagctacatatcctactgggcttactggggccaagggactctggtcaccgtctcctcaggtggtggtggttctggcggcggcggctccggtggtggtggttctcagactgttgtgactcaggaaccttcactcaccgtatcacctggtggaacagtcacactcacttgtggctcctcgactggggctgttacatctggcaactacccaaactgggtccaacaaaaaccaggtcaggcaccccgtggtctaataggtgggactaagttcctcgcccccggtactcctgccagattctcaggctccctgcttggaggcaaggctgccctcaccctctcaggggtacagccagaggatgaggcagaatattactgtgttctatggtacagcaaccgctgggtgttcggtggaggaaccaaactgactgtccta

SEQ ID NO: 709 - protein, 115 aa, Artificial
  unknown organism
QVQLVQSGAEVKKPGASVKVSCKTSGYTFTDYTIQWVRQAPGKRLEWIGGIDPNNGGTMYNQKFKGRVTLTRDTSASTAYMELSSLRSEDTAVYYCTRAEAMDYWGQGTTVTVSS

SEQ ID NO: 710 - protein, 5 aa, Artificial
  unknown organism
DYTIQ

SEQ ID NO: 711 - protein, 17 aa, Artificial
  unknown organism
GIDPNNGGTMYNQKFKG

SEQ ID NO: 712 - protein, 6 aa, Artificial
  unknown organism
AEAMDY

SEQ ID NO: 713 - DNA, 345 bp, Artificial
  unknown organism
caggtgcagctggtccagtctggagctgaagtgaagaagcctggagcttcagtgaaggtatcctgcaagacttctggatacacattcactgattacaccatacaatgggtgaggcaggctcctggaaagagacttgagtggattggaggtattgatcctaacaatggtggtaccatgtataaccaaaaattcaagggcagggttacattaactcgtgacacgtctgccagcacagcctacatggagctgagcagtctgaggtctgaggatactgcagtctattactgcacaagagcagaggctatggactactggggtcaaggaaccacggtcaccgtctcctca

SEQ ID NO: 714 - protein, 112 aa, Artificial
  unknown organism
DVVMTQSPLSLPVTLGQPASISCRSSESLVYRDGNTYLSWFHQRPGQSPRRLIYKVSNRDSGVPDRFGGSGSGSEFTLKISRVEAEDVGVYYCMQHTFWPWTFGQGTKVDIK

SEQ ID NO: 715 - protein, 16 aa, Artificial
  unknown organism
RSSESLVYRDGNTYLS

SEQ ID NO: 716 - protein, 7 aa, Artificial
  unknown organism
KVSNRDS

SEQ ID NO: 717 - protein, 9 aa, Artificial
  unknown organism
MQHTFWPWT

SEQ ID NO: 718 - DNA, 336 bp, Artificial
  unknown organism
gatgtcgtgatgactcagtctccactctccctgcccgtcacccttggacagccggcctccatctcctgcaggtctagtgaaagtctcgtttacagggatggaaacacgtacttgagttggtttcaccagaggcccggccaatctccaaggcgcctaatttataaggtctctaaccgggactctggggtcccagacagattcggcggcagtgggtcaggctctgagttcacactgaaaatcagcagggtggaggctgaggatgttggggtttattactgcatgcaacatacattctggccttggactttcggccaagggaccaaagtggatatcaaa

SEQ ID NO: 719 - protein, 242 aa, Artificial
  unknown organism
QVQLVQSGAEVKKPGASVKVSCKTSGYTFTDYTIQWVRQAPGKRLEWIGGIDPNNGGTMYNQKFKGRVTLTRDTSASTAYMELSSLRSEDTAVYYCTRAEAMDYWGQGTTVTVSSGGGGSGGGGSGGGGSDVVMTQSPLSLPVTLGQPASISCRSSESLVYRDGNTYLSWFHQRPGQSPRRLIYKVSNRDSGVPDRFGGSGSGSEFTLKISRVEAEDVGVYYCMQHTFWPWTFGQGTKVDIK

SEQ ID NO: 720 - DNA, 726 bp, Artificial
  unknown organism
caggtgcagctggtccagtctggagctgaagtgaagaagcctggagcttcagtgaaggtatcctgcaagacttctggatacacattcactgattacaccatacaatgggtgaggcaggctcctggaaagagacttgagtggattggaggtattgatcctaacaatggtggtaccatgtataaccaaaaattcaagggcagggttacattaactcgtgacacgtctgccagcacagcctacatggagctgagcagtctgaggtctgaggatactgcagtctattactgcacaagagcagaggctatggactactggggtcaaggaaccacggtcaccgtctcctcaggtggtggtggttctggcggcggcggctccggtggtggtggttctgatgtcgtgatgactcagtctccactctccctgcccgtcacccttggacagccggcctccatctcctgcaggtctagtgaaagtctcgtttacagggatggaaacacgtacttgagttggtttcaccagaggcccggccaatctccaaggcgcctaatttataaggtctctaaccgggactctggggtcccagacagattcggcggcagtgggtcaggctctgagttcacactgaaaatcagcagggtggaggctgaggatgttggggtttattactgcatgcaacatacattctggccttggactttcggccaagggaccaaagtggatatcaaa

SEQ ID NO: 721 - protein, 497 aa, Artificial
  unknown organism
QVQLVQSGAEVKKPGASVKVSCKTSGYTFTDYTIQWVRQAPGKRLEWIGGIDPNNGGTMYNQKFKGRVTLTRDTSASTAYMELSSLRSEDTAVYYCTRAEAMDYWGQGTTVTVSSGGGGSGGGGSGGGGSDVVMTQSPLSLPVTLGQPASISCRSSESLVYRDGNTYLSWFHQRPGQSPRRLIYKVSNRDSGVPDRFGGSGSGSEFTLKISRVEAEDVGVYYCMQHTFWPWTFGQGTKVDIKSGGGGSEVQLVESGGGLVQPGGSLKLSCAASGFTFNKYAMNWVRQAPGKGLEWVARIRSKYNNYATYYADSVKDRFTISRDDSKNTAYLQMNNLKTEDTAVYYCVRHGNFGNSYISYWAYWGQGTLVTVSSGGGGSGGGGSGGGGSQTVVTQEPSLTVSPGGTVTLTCGSSTGAVTSGNYPNWVQQKPGQAPRGLIGGTKFLAPGTPARFSGSLLGGKAALTLSGVQPEDEAEYYCVLWYSNRWVFGGGTKLTVL

SEQ ID NO: 722 - DNA, 1491 bp, Artificial
  unknown organism
caggtgcagctggtccagtctggagctgaagtgaagaagcctggagcttcagtgaaggtatcctgcaagacttctggatacacattcactgattacaccatacaatgggtgaggcaggctcctggaaagagacttgagtggattggaggtattgatcctaacaatggtggtaccatgtataaccaaaaattcaagggcagggttacattaactcgtgacacgtctgccagcacagcctacatggagctgagcagtctgaggtctgaggatactgcagtctattactgcacaagagcagaggctatggactactggggtcaaggaaccacggtcaccgtctcctcaggtggtggtggttctggcggcggcggctccggtggtggtggttctgatgtcgtgatgactcagtctccactctccctgcccgtcacccttggacagccggcctccatctcctgcaggtctagtgaaagtctcgtttacagggatggaaacacgtacttgagttggtttcaccagaggcccggccaatctccaaggcgcctaatttataaggtctctaaccgggactctggggtcccagacagattcggcggcagtgggtcaggctctgagttcacactgaaaatcagcagggtggaggctgaggatgttggggtttattactgcatgcaacatacattctggccttggactttcggccaagggaccaaagtggatatcaaatccggaggtggtggatccgaggtgcagctggtcgagtctggaggaggattggtgcagcctggagggtcattgaaactctcatgtgcagcctctggattcaccttcaataagtacgccatgaactgggtccgccaggctccaggaaagggtttggaatgggttgctcgcataagaagtaaatataataattatgcaacatattatgccgattcagtgaaagacaggttcaccatctccagagatgattcaaaaaacactgcctatctacaaatgaacaacttgaaaactgaggacactgccgtgtactactgtgtgagacatgggaacttcggtaatagctacatatcctactgggcttactggggccaagggactctggtcaccgtctcctcaggtggtggtggttctggcggcggcggctccggtggtggtggttctcagactgttgtgactcaggaaccttcactcaccgtatcacctggtggaacagtcacactcacttgtggctcctcgactggggctgttacatctggcaactacccaaactgggtccaacaaaaaccaggtcaggcaccccgtggtctaataggtgggactaagttcctcgcccccggtactcctgccagattctcaggctccctgcttggaggcaaggctgccctcaccctctcaggggtacagccagaggatgaggcagaatattactgtgttctatggtacagcaaccgctgggtgttcggtggaggaaccaaactgactgtccta

SEQ ID NO: 723 - protein, 115 aa, Artificial
  unknown organism
QVQLVQSGAEVKKPGASVKVSCKTSGYTFTDYTIQWVRQAPGKRLEWIGGIDPNNGGTMYNQNFKGRVTLTRDTSASTAYMELSSLRSEDTAVYYCTRAEAMDYWGQGTTVTVSS

SEQ ID NO: 724 - protein, 5 aa, Artificial
  unknown organism
DYTIQ

SEQ ID NO: 725 - protein, 17 aa, Artificial
  unknown organism
GIDPNNGGTMYNQNFKG

SEQ ID NO: 726 - protein, 6 aa, Artificial
  unknown organism
AEAMDY

SEQ ID NO: 727 - DNA, 345 bp, Artificial
  unknown organism
caggtgcagctggtccagtctggagctgaagtgaagaagcctggggcttcagtgaaggtatcctgcaagacttctggatacacattcactgattacaccatacaatgggtgaggcaggctcctggaaagagacttgagtggattggaggtattgatcctaacaatggtggtaccatgtataaccaaaatttcaagggcagggttacattaactcgtgacacgtctgccagcacagcctacatggagctgagcagtctgaggtctgaggatactgcagtctattactgcacaagagcagaggctatggactactggggtcaaggaaccacggtcaccgtctcctca

SEQ ID NO: 728 - protein, 112 aa, Artificial
  unknown organism
DVVMTQSPLSLPVTLGQPASISCRSSESLVYRDGNTYLSWFHQRPGQSPRRLIYKVSNRDSGVPDRFSGSGSGTEFTLKISRVEAEDVGVYYCMQHTYWPWTFGQGTKVDIK

SEQ ID NO: 729 - protein, 16 aa, Artificial
  unknown organism
RSSESLVYRDGNTYLS

SEQ ID NO: 730 - protein, 7 aa, Artificial
  unknown organism
KVSNRDS

SEQ ID NO: 731 - protein, 9 aa, Artificial
  unknown organism
MQHTYWPWT

SEQ ID NO: 732 - DNA, 336 bp, Artificial
  unknown organism
gatgtcgtgatgactcagtctccactctccctgcccgtcacccttggacagccggcctccatctcctgcaggtctagtgaaagtctcgtttacagggatggaaacacgtacttgagttggtttcaccagaggcccggccaatctccaaggcgcctaatttataaggtctctaaccgggattctggggtcccagacagattcagcggcagtgggtcaggcactgagttcacactgaaaatcagcagggtggaggctgaggatgttggggtttattactgcatgcaacatacatactggccttggactttcggccaagggaccaaagtggatatcaaa

SEQ ID NO: 733 - protein, 242 aa, Artificial
  unknown organism
QVQLVQSGAEVKKPGASVKVSCKTSGYTFTDYTIQWVRQAPGKRLEWIGGIDPNNGGTMYNQNFKGRVTLTRDTSASTAYMELSSLRSEDTAVYYCTRAEAMDYWGQGTTVTVSSGGGGSGGGGSGGGGSDVVMTQSPLSLPVTLGQPASISCRSSESLVYRDGNTYLSWFHQRPGQSPRRLIYKVSNRDSGVPDRFSGSGSGTEFTLKISRVEAEDVGVYYCMQHTYWPWTFGQGTKVDIK

SEQ ID NO: 734 - DNA, 726 bp, Artificial
  unknown organism
caggtgcagctggtccagtctggagctgaagtgaagaagcctggggcttcagtgaaggtatcctgcaagacttctggatacacattcactgattacaccatacaatgggtgaggcaggctcctggaaagagacttgagtggattggaggtattgatcctaacaatggtggtaccatgtataaccaaaatttcaagggcagggttacattaactcgtgacacgtctgccagcacagcctacatggagctgagcagtctgaggtctgaggatactgcagtctattactgcacaagagcagaggctatggactactggggtcaaggaaccacggtcaccgtctcctcaggtggtggtggttctggcggcggcggctccggtggtggtggttctgatgtcgtgatgactcagtctccactctccctgcccgtcacccttggacagccggcctccatctcctgcaggtctagtgaaagtctcgtttacagggatggaaacacgtacttgagttggtttcaccagaggcccggccaatctccaaggcgcctaatttataaggtctctaaccgggattctggggtcccagacagattcagcggcagtgggtcaggcactgagttcacactgaaaatcagcagggtggaggctgaggatgttggggtttattactgcatgcaacatacatactggccttggactttcggccaagggaccaaagtggatatcaaa

SEQ ID NO: 735 - protein, 497 aa, Artificial
  unknown organism
QVQLVQSGAEVKKPGASVKVSCKTSGYTFTDYTIQWVRQAPGKRLEWIGGIDPNNGGTMYNQNFKGRVTLTRDTSASTAYMELSSLRSEDTAVYYCTRAEAMDYWGQGTTVTVSSGGGGSGGGGSGGGGSDVVMTQSPLSLPVTLGQPASISCRSSESLVYRDGNTYLSWFHQRPGQSPRRLIYKVSNRDSGVPDRFSGSGSGTEFTLKISRVEAEDVGVYYCMQHTYWPWTFGQGTKVDIKSGGGGSEVQLVESGGGLVQPGGSLKLSCAASGFTFNKYAMNWVRQAPGKGLEWVARIRSKYNNYATYYADSVKDRFTISRDDSKNTAYLQMNNLKTEDTAVYYCVRHGNFGNSYISYWAYWGQGTLVTVSSGGGGSGGGGSGGGGSQTVVTQEPSLTVSPGGTVTLTCGSSTGAVTSGNYPNWVQQKPGQAPRGLIGGTKFLAPGTPARFSGSLLGGKAALTLSGVQPEDEAEYYCVLWYSNRWVFGGGTKLTVL

SEQ ID NO: 736 - DNA, 1491 bp, Artificial
  unknown organism
caggtgcagctggtccagtctggagctgaagtgaagaagcctggggcttcagtgaaggtatcctgcaagacttctggatacacattcactgattacaccatacaatgggtgaggcaggctcctggaaagagacttgagtggattggaggtattgatcctaacaatggtggtaccatgtataaccaaaatttcaagggcagggttacattaactcgtgacacgtctgccagcacagcctacatggagctgagcagtctgaggtctgaggatactgcagtctattactgcacaagagcagaggctatggactactggggtcaaggaaccacggtcaccgtctcctcaggtggtggtggttctggcggcggcggctccggtggtggtggttctgatgtcgtgatgactcagtctccactctccctgcccgtcacccttggacagccggcctccatctcctgcaggtctagtgaaagtctcgtttacagggatggaaacacgtacttgagttggtttcaccagaggcccggccaatctccaaggcgcctaatttataaggtctctaaccgggattctggggtcccagacagattcagcggcagtgggtcaggcactgagttcacactgaaaatcagcagggtggaggctgaggatgttggggtttattactgcatgcaacatacatactggccttggactttcggccaagggaccaaagtggatatcaaatccggaggtggtggatccgaggtgcagctggtcgagtctggaggaggattggtgcagcctggagggtcattgaaactctcatgtgcagcctctggattcaccttcaataagtacgccatgaactgggtccgccaggctccaggaaagggtttggaatgggttgctcgcataagaagtaaatataataattatgcaacatattatgccgattcagtgaaagacaggttcaccatctccagagatgattcaaaaaacactgcctatctacaaatgaacaacttgaaaactgaggacactgccgtgtactactgtgtgagacatgggaacttcggtaatagctacatatcctactgggcttactggggccaagggactctggtcaccgtctcctcaggtggtggtggttctggcggcggcggctccggtggtggtggttctcagactgttgtgactcaggaaccttcactcaccgtatcacctggtggaacagtcacactcacttgtggctcctcgactggggctgttacatctggcaactacccaaactgggtccaacaaaaaccaggtcaggcaccccgtggtctaataggtgggactaagttcctcgcccccggtactcctgccagattctcaggctccctgcttggaggcaaggctgccctcaccctctcaggggtacagccagaggatgaggcagaatattactgtgttctatggtacagcaaccgctgggtgttcggtggaggaaccaaactgactgtccta

SEQ ID NO: 737 - protein, 115 aa, Artificial
  unknown organism
QVQLVQSRAEVKKPGASVKVSCKTSGYTFTDYTIQWVRQAPGKRLEWIGGIDPNNGGTMYNQKFKGRVTLTRDTSASTAYMVLSSLRSEDTAVYYCTRAEAMDYWGQGTTVTVSS

SEQ ID NO: 738 - protein, 5 aa, Artificial
  unknown organism
DYTIQ

SEQ ID NO: 739 - protein, 17 aa, Artificial
  unknown organism
GIDPNNGGTMYNQKFKG

SEQ ID NO: 740 - protein, 6 aa, Artificial
  unknown organism
AEAMDY

SEQ ID NO: 741 - DNA, 345 bp, Artificial
  unknown organism
caggtgcagctggtccagtctagagctgaagtgaagaagcctggggcttcagtgaaggtatcctgcaagacttctggatacacattcactgattacaccatacaatgggtgaggcaggctcctggaaagagacttgagtggattggaggtattgatcctaacaatggtggtaccatgtataaccaaaaattcaagggcagggttacattaactcgtgacacgtctgccagcacagcctacatggtgctgagcagtctgaggtctgaggatactgcagtctattactgcacaagagcagaggctatggactactggggtcaaggaaccacggtcaccgtctcctca

SEQ ID NO: 742 - protein, 112 aa, Artificial
  unknown organism
DVVMTQSPLSLPVTLGQPASVSCRSSESLVYRDGNTYLSWFHQRPGQSPRRLIYKVSNRDSGVPDRFSGSGSGTEFTLKISRVEAEDVGVYYCMQHTFWPWTFGQGTKVDIK

SEQ ID NO: 743 - protein, 16 aa, Artificial
  unknown organism
RSSESLVYRDGNTYLS

SEQ ID NO: 744 - protein, 7 aa, Artificial
  unknown organism
KVSNRDS

SEQ ID NO: 745 - protein, 9 aa, Artificial
  unknown organism
MQHTFWPWT

SEQ ID NO: 746 - DNA, 336 bp, Artificial
  unknown organism
gatgtcgtgatgactcagtctccactctccctgcccgtcacccttggacagccggcctccgtctcctgcaggtctagtgaaagtctcgtttacagggatggaaacacgtacttgagttggtttcaccagaggcccggccaatctccaaggcgcctaatttataaggtctctaaccgggactctggggtcccagacagattcagcggcagtgggtcaggaactgagttcacactgaaaatcagcagggtggaggctgaggatgttggggtttattactgcatgcaacatacattctggccttggactttcggccaagggaccaaagtggatatcaaa

SEQ ID NO: 747 - protein, 242 aa, Artificial
  unknown organism
QVQLVQSRAEVKKPGASVKVSCKTSGYTFTDYTIQWVRQAPGKRLEWIGGIDPNNGGTMYNQKFKGRVTLTRDTSASTAYMVLSSLRSEDTAVYYCTRAEAMDYWGQGTTVTVSSGGGGSGGGGSGGGGSDVVMTQSPLSLPVTLGQPASVSCRSSESLVYRDGNTYLSWFHQRPGQSPRRLIYKVSNRDSGVPDRFSGSGSGTEFTLKISRVEAEDVGVYYCMQHTFWPWTFGQGTKVDIK

SEQ ID NO: 748 - DNA, 726 bp, Artificial
  unknown organism
caggtgcagctggtccagtctagagctgaagtgaagaagcctggggcttcagtgaaggtatcctgcaagacttctggatacacattcactgattacaccatacaatgggtgaggcaggctcctggaaagagacttgagtggattggaggtattgatcctaacaatggtggtaccatgtataaccaaaaattcaagggcagggttacattaactcgtgacacgtctgccagcacagcctacatggtgctgagcagtctgaggtctgaggatactgcagtctattactgcacaagagcagaggctatggactactggggtcaaggaaccacggtcaccgtctcctcaggtggtggtggttctggcggcggcggctccggtggtggtggttctgatgtcgtgatgactcagtctccactctccctgcccgtcacccttggacagccggcctccgtctcctgcaggtctagtgaaagtctcgtttacagggatggaaacacgtacttgagttggtttcaccagaggcccggccaatctccaaggcgcctaatttataaggtctctaaccgggactctggggtcccagacagattcagcggcagtgggtcaggaactgagttcacactgaaaatcagcagggtggaggctgaggatgttggggtttattactgcatgcaacatacattctggccttggactttcggccaagggaccaaagtggatatcaaa

SEQ ID NO: 749 - protein, 497 aa, Artificial
  unknown organism
QVQLVQSRAEVKKPGASVKVSCKTSGYTFTDYTIQWVRQAPGKRLEWIGGIDPNNGGTMYNQKFKGRVTLTRDTSASTAYMVLSSLRSEDTAVYYCTRAEAMDYWGQGTTVTVSSGGGGSGGGGSGGGGSDVVMTQSPLSLPVTLGQPASVSCRSSESLVYRDGNTYLSWFHQRPGQSPRRLIYKVSNRDSGVPDRFSGSGSGTEFTLKISRVEAEDVGVYYCMQHTFWPWTFGQGTKVDIKSGGGGSEVQLVESGGGLVQPGGSLKLSCAASGFTFNKYAMNWVRQAPGKGLEWVARIRSKYNNYATYYADSVKDRFTISRDDSKNTAYLQMNNLKTEDTAVYYCVRHGNFGNSYISYWAYWGQGTLVTVSSGGGGSGGGGSGGGGSQTVVTQEPSLTVSPGGTVTLTCGSSTGAVTSGNYPNWVQQKPGQAPRGLIGGTKFLAPGTPARFSGSLLGGKAALTLSGVQPEDEAEYYCVLWYSNRWVFGGGTKLTVL

SEQ ID NO: 750 - DNA, 1491 bp, Artificial
  unknown organism
caggtgcagctggtccagtctagagctgaagtgaagaagcctggggcttcagtgaaggtatcctgcaagacttctggatacacattcactgattacaccatacaatgggtgaggcaggctcctggaaagagacttgagtggattggaggtattgatcctaacaatggtggtaccatgtataaccaaaaattcaagggcagggttacattaactcgtgacacgtctgccagcacagcctacatggtgctgagcagtctgaggtctgaggatactgcagtctattactgcacaagagcagaggctatggactactggggtcaaggaaccacggtcaccgtctcctcaggtggtggtggttctggcggcggcggctccggtggtggtggttctgatgtcgtgatgactcagtctccactctccctgcccgtcacccttggacagccggcctccgtctcctgcaggtctagtgaaagtctcgtttacagggatggaaacacgtacttgagttggtttcaccagaggcccggccaatctccaaggcgcctaatttataaggtctctaaccgggactctggggtcccagacagattcagcggcagtgggtcaggaactgagttcacactgaaaatcagcagggtggaggctgaggatgttggggtttattactgcatgcaacatacattctggccttggactttcggccaagggaccaaagtggatatcaaatccggaggtggtggatccgaggtgcagctggtcgagtctggaggaggattggtgcagcctggagggtcattgaaactctcatgtgcagcctctggattcaccttcaataagtacgccatgaactgggtccgccaggctccaggaaagggtttggaatgggttgctcgcataagaagtaaatataataattatgcaacatattatgccgattcagtgaaagacaggttcaccatctccagagatgattcaaaaaacactgcctatctacaaatgaacaacttgaaaactgaggacactgccgtgtactactgtgtgagacatgggaacttcggtaatagctacatatcctactgggcttactggggccaagggactctggtcaccgtctcctcaggtggtggtggttctggcggcggcggctccggtggtggtggttctcagactgttgtgactcaggaaccttcactcaccgtatcacctggtggaacagtcacactcacttgtggctcctcgactggggctgttacatctggcaactacccaaactgggtccaacaaaaaccaggtcaggcaccccgtggtctaataggtgggactaagttcctcgcccccggtactcctgccagattctcaggctccctgcttggaggcaaggctgccctcaccctctcaggggtacagccagaggatgaggcagaatattactgtgttctatggtacagcaaccgctgggtgttcggtggaggaaccaaactgactgtccta

SEQ ID NO: 751 - protein, 115 aa, Artificial
  unknown organism
QVQLVQSGAEVKKPGASVKVSCKTSGYTFTDYTIQWVRQAPGKRLEWIGGIDPTNGGTMYNQKFKGRVTLTRDTSASTAYMELSSLRSEDTAVYYCTRAEAMDYWGQGTTVTVSS

SEQ ID NO: 752 - protein, 5 aa, Artificial
  unknown organism
DYTIQ

SEQ ID NO: 753 - protein, 17 aa, Artificial
  unknown organism
GIDPTNGGTMYNQKFKG

SEQ ID NO: 754 - protein, 6 aa, Artificial
  unknown organism
AEAMDY

SEQ ID NO: 755 - DNA, 345 bp, Artificial
  unknown organism
caggtgcagctggtccagtctggagctgaagtgaagaagcctggggcttcagtgaaggtatcctgcaagacttctggatacacattcactgattacaccatacaatgggtgaggcaggctcctggaaagagacttgagtggattggaggtattgatcctaccaatggtggtaccatgtataaccaaaaattcaagggcagggttacattaactcgtgacacgtctgccagcacagcctacatggagctgagcagtctgaggtctgaggatactgcagtctattactgcacaagagcagaggctatggactactggggtcaaggaaccacggtcaccgtctcctca

SEQ ID NO: 756 - protein, 112 aa, Artificial
  unknown organism
DVVMTQSPLSLPVTLGQPASISCRSSESLVYRDGNTYLSWFHQRPGQSPRRLIYKVSNRDSGVPDRFSGSGTGTEFTLKISRVEAEDVGVYYCMQHTFWPWTFGQGTKVDIK

SEQ ID NO: 757 - protein, 16 aa, Artificial
  unknown organism
RSSESLVYRDGNTYLS

SEQ ID NO: 758 - protein, 7 aa, Artificial
  unknown organism
KVSNRDS

SEQ ID NO: 759 - protein, 9 aa, Artificial
  unknown organism
MQHTFWPWT

SEQ ID NO: 760 - DNA, 336 bp, Artificial
  unknown organism
gatgtcgtgatgactcagtctccactctccctgcccgtcacccttggacagccggcctccatctcctgcaggtctagtgaaagtctcgtttacagggatggaaacacgtacttgagttggtttcaccagaggcccggccaatctccaaggcgcctaatttataaggtctctaaccgggactctggggtcccagacagattcagcggcagtgggacaggcactgagttcacactgaaaatcagcagggtggaggctgaggatgttggggtttattactgcatgcaacatacattctggccttggactttcggccaagggaccaaagtggatatcaaa

SEQ ID NO: 761 - protein, 242 aa, Artificial
  unknown organism
QVQLVQSGAEVKKPGASVKVSCKTSGYTFTDYTIQWVRQAPGKRLEWIGGIDPTNGGTMYNQKFKGRVTLTRDTSASTAYMELSSLRSEDTAVYYCTRAEAMDYWGQGTTVTVSSGGGGSGGGGSGGGGSDVVMTQSPLSLPVTLGQPASISCRSSESLVYRDGNTYLSWFHQRPGQSPRRLIYKVSNRDSGVPDRFSGSGTGTEFTLKISRVEAEDVGVYYCMQHTFWPWTFGQGTKVDIK

SEQ ID NO: 762 - DNA, 726 bp, Artificial
  unknown organism
caggtgcagctggtccagtctggagctgaagtgaagaagcctggggcttcagtgaaggtatcctgcaagacttctggatacacattcactgattacaccatacaatgggtgaggcaggctcctggaaagagacttgagtggattggaggtattgatcctaccaatggtggtaccatgtataaccaaaaattcaagggcagggttacattaactcgtgacacgtctgccagcacagcctacatggagctgagcagtctgaggtctgaggatactgcagtctattactgcacaagagcagaggctatggactactggggtcaaggaaccacggtcaccgtctcctcaggtggtggtggttctggcggcggcggctccggtggtggtggttctgatgtcgtgatgactcagtctccactctccctgcccgtcacccttggacagccggcctccatctcctgcaggtctagtgaaagtctcgtttacagggatggaaacacgtacttgagttggtttcaccagaggcccggccaatctccaaggcgcctaatttataaggtctctaaccgggactctggggtcccagacagattcagcggcagtgggacaggcactgagttcacactgaaaatcagcagggtggaggctgaggatgttggggtttattactgcatgcaacatacattctggccttggactttcggccaagggaccaaagtggatatcaaa

SEQ ID NO: 763 - protein, 497 aa, Artificial
  unknown organism
QVQLVQSGAEVKKPGASVKVSCKTSGYTFTDYTIQWVRQAPGKRLEWIGGIDPTNGGTMYNQKFKGRVTLTRDTSASTAYMELSSLRSEDTAVYYCTRAEAMDYWGQGTTVTVSSGGGGSGGGGSGGGGSDVVMTQSPLSLPVTLGQPASISCRSSESLVYRDGNTYLSWFHQRPGQSPRRLIYKVSNRDSGVPDRFSGSGTGTEFTLKISRVEAEDVGVYYCMQHTFWPWTFGQGTKVDIKSGGGGSEVQLVESGGGLVQPGGSLKLSCAASGFTFNKYAMNWVRQAPGKGLEWVARIRSKYNNYATYYADSVKDRFTISRDDSKNTAYLQMNNLKTEDTAVYYCVRHGNFGNSYISYWAYWGQGTLVTVSSGGGGSGGGGSGGGGSQTVVTQEPSLTVSPGGTVTLTCGSSTGAVTSGNYPNWVQQKPGQAPRGLIGGTKFLAPGTPARFSGSLLGGKAALTLSGVQPEDEAEYYCVLWYSNRWVFGGGTKLTVL

SEQ ID NO: 764 - DNA, 1491 bp, Artificial
  unknown organism
caggtgcagctggtccagtctggagctgaagtgaagaagcctggggcttcagtgaaggtatcctgcaagacttctggatacacattcactgattacaccatacaatgggtgaggcaggctcctggaaagagacttgagtggattggaggtattgatcctaccaatggtggtaccatgtataaccaaaaattcaagggcagggttacattaactcgtgacacgtctgccagcacagcctacatggagctgagcagtctgaggtctgaggatactgcagtctattactgcacaagagcagaggctatggactactggggtcaaggaaccacggtcaccgtctcctcaggtggtggtggttctggcggcggcggctccggtggtggtggttctgatgtcgtgatgactcagtctccactctccctgcccgtcacccttggacagccggcctccatctcctgcaggtctagtgaaagtctcgtttacagggatggaaacacgtacttgagttggtttcaccagaggcccggccaatctccaaggcgcctaatttataaggtctctaaccgggactctggggtcccagacagattcagcggcagtgggacaggcactgagttcacactgaaaatcagcagggtggaggctgaggatgttggggtttattactgcatgcaacatacattctggccttggactttcggccaagggaccaaagtggatatcaaatccggaggtggtggatccgaggtgcagctggtcgagtctggaggaggattggtgcagcctggagggtcattgaaactctcatgtgcagcctctggattcaccttcaataagtacgccatgaactgggtccgccaggctccaggaaagggtttggaatgggttgctcgcataagaagtaaatataataattatgcaacatattatgccgattcagtgaaagacaggttcaccatctccagagatgattcaaaaaacactgcctatctacaaatgaacaacttgaaaactgaggacactgccgtgtactactgtgtgagacatgggaacttcggtaatagctacatatcctactgggcttactggggccaagggactctggtcaccgtctcctcaggtggtggtggttctggcggcggcggctccggtggtggtggttctcagactgttgtgactcaggaaccttcactcaccgtatcacctggtggaacagtcacactcacttgtggctcctcgactggggctgttacatctggcaactacccaaactgggtccaacaaaaaccaggtcaggcaccccgtggtctaataggtgggactaagttcctcgcccccggtactcctgccagattctcaggctccctgcttggaggcaaggctgccctcaccctctcaggggtacagccagaggatgaggcagaatattactgtgttctatggtacagcaaccgctgggtgttcggtggaggaaccaaactgactgtccta

SEQ ID NO: 765 - protein, 115 aa, Artificial
  unknown organism
QVQLVQSGAEVKKPGASVKVSCKASGYAFTEYTIQWVRQAPGKRLEWIGGIDPINGGTMYNQKFKGRVTLTRDTSASTAYMELSSLTSEDTAVYYCTRAEAMDYWGQGTTVTVSS

SEQ ID NO: 766 - protein, 5 aa, Artificial
  unknown organism
EYTIQ

SEQ ID NO: 767 - protein, 17 aa, Artificial
  unknown organism
GIDPINGGTMYNQKFKG

SEQ ID NO: 768 - protein, 6 aa, Artificial
  unknown organism
AEAMDY

SEQ ID NO: 769 - DNA, 345 bp, Artificial
  unknown organism
caggtgcagctggtccagtctggagctgaagtgaagaagcctggggcttcagtgaaggtatcctgcaaggcttctggatacgcattcactgaatacaccatacaatgggtgaggcaggcccctggaaagagacttgagtggattggaggtattgatcctatcaatggtggtaccatgtataaccaaaaattcaaaggcagggtcacattaactcgcgacacgtctgccagtacagcctacatggagctgagcagtctgacgtctgaggatactgcagtctattactgcacaagagcagaggctatggactactggggtcaaggaaccacggtcaccgtctcctca

SEQ ID NO: 770 - protein, 112 aa, Artificial
  unknown organism
DVVMTQSPLSLPVTLGQPASISCRSSESLVYRDGNTYLSWFHQRPGQSPRRLIYKVSNRDSGVPDRFSGSGSGTEFTLKISRVEAEDVGVYYCMQDTFWPWTFGQGTKVDIK

SEQ ID NO: 771 - protein, 16 aa, Artificial
  unknown organism
RSSESLVYRDGNTYLS

SEQ ID NO: 772 - protein, 7 aa, Artificial
  unknown organism
KVSNRDS

SEQ ID NO: 773 - protein, 9 aa, Artificial
  unknown organism
MQDTFWPWT

SEQ ID NO: 774 - DNA, 336 bp, Artificial
  unknown organism
gatgtcgtgatgactcagtctccactctccctgcccgtcacccttggacagccggcctccatctcctgcaggtctagtgaaagtctcgtttacagggatggaaacacgtacttgagttggtttcaccagaggcccggccaatctccaaggcgcctaatttataaggtctctaaccgggactctggggtcccagacagattcagcggcagtgggtcaggcactgagttcacactgaaaatcagcagggtggaggctgaggatgttggggtttattactgcatgcaagatacattctggccttggactttcggccaagggaccaaagtggatatcaaa

SEQ ID NO: 775 - protein, 242 aa, Artificial
  unknown organism
QVQLVQSGAEVKKPGASVKVSCKASGYAFTEYTIQWVRQAPGKRLEWIGGIDPINGGTMYNQKFKGRVTLTRDTSASTAYMELSSLTSEDTAVYYCTRAEAMDYWGQGTTVTVSSGGGGSGGGGSGGGGSDVVMTQSPLSLPVTLGQPASISCRSSESLVYRDGNTYLSWFHQRPGQSPRRLIYKVSNRDSGVPDRFSGSGSGTEFTLKISRVEAEDVGVYYCMQDTFWPWTFGQGTKVDIK

SEQ ID NO: 776 - DNA, 726 bp, Artificial
  unknown organism
caggtgcagctggtccagtctggagctgaagtgaagaagcctggggcttcagtgaaggtatcctgcaaggcttctggatacgcattcactgaatacaccatacaatgggtgaggcaggcccctggaaagagacttgagtggattggaggtattgatcctatcaatggtggtaccatgtataaccaaaaattcaaaggcagggtcacattaactcgcgacacgtctgccagtacagcctacatggagctgagcagtctgacgtctgaggatactgcagtctattactgcacaagagcagaggctatggactactggggtcaaggaaccacggtcaccgtctcctcaggtggtggtggttctggcggcggcggctccggtggtggtggttctgatgtcgtgatgactcagtctccactctccctgcccgtcacccttggacagccggcctccatctcctgcaggtctagtgaaagtctcgtttacagggatggaaacacgtacttgagttggtttcaccagaggcccggccaatctccaaggcgcctaatttataaggtctctaaccgggactctggggtcccagacagattcagcggcagtgggtcaggcactgagttcacactgaaaatcagcagggtggaggctgaggatgttggggtttattactgcatgcaagatacattctggccttggactttcggccaagggaccaaagtggatatcaaa

SEQ ID NO: 777 - protein, 497 aa, Artificial
  unknown organism
QVQLVQSGAEVKKPGASVKVSCKASGYAFTEYTIQWVRQAPGKRLEWIGGIDPINGGTMYNQKFKGRVTLTRDTSASTAYMELSSLTSEDTAVYYCTRAEAMDYWGQGTTVTVSSGGGGSGGGGSGGGGSDVVMTQSPLSLPVTLGQPASISCRSSESLVYRDGNTYLSWFHQRPGQSPRRLIYKVSNRDSGVPDRFSGSGSGTEFTLKISRVEAEDVGVYYCMQDTFWPWTFGQGTKVDIKSGGGGSEVQLVESGGGLVQPGGSLKLSCAASGFTFNKYAMNWVRQAPGKGLEWVARIRSKYNNYATYYADSVKDRFTISRDDSKNTAYLQMNNLKTEDTAVYYCVRHGNFGNSYISYWAYWGQGTLVTVSSGGGGSGGGGSGGGGSQTVVTQEPSLTVSPGGTVTLTCGSSTGAVTSGNYPNWVQQKPGQAPRGLIGGTKFLAPGTPARFSGSLLGGKAALTLSGVQPEDEAEYYCVLWYSNRWVFGGGTKLTVL

SEQ ID NO: 778 - DNA, 1491 bp, Artificial
  unknown organism
caggtgcagctggtccagtctggagctgaagtgaagaagcctggggcttcagtgaaggtatcctgcaaggcttctggatacgcattcactgaatacaccatacaatgggtgaggcaggcccctggaaagagacttgagtggattggaggtattgatcctatcaatggtggtaccatgtataaccaaaaattcaaaggcagggtcacattaactcgcgacacgtctgccagtacagcctacatggagctgagcagtctgacgtctgaggatactgcagtctattactgcacaagagcagaggctatggactactggggtcaaggaaccacggtcaccgtctcctcaggtggtggtggttctggcggcggcggctccggtggtggtggttctgatgtcgtgatgactcagtctccactctccctgcccgtcacccttggacagccggcctccatctcctgcaggtctagtgaaagtctcgtttacagggatggaaacacgtacttgagttggtttcaccagaggcccggccaatctccaaggcgcctaatttataaggtctctaaccgggactctggggtcccagacagattcagcggcagtgggtcaggcactgagttcacactgaaaatcagcagggtggaggctgaggatgttggggtttattactgcatgcaagatacattctggccttggactttcggccaagggaccaaagtggatatcaaatccggaggtggtggatccgaggtgcagctggtcgagtctggaggaggattggtgcagcctggagggtcattgaaactctcatgtgcagcctctggattcaccttcaataagtacgccatgaactgggtccgccaggctccaggaaagggtttggaatgggttgctcgcataagaagtaaatataataattatgcaacatattatgccgattcagtgaaagacaggttcaccatctccagagatgattcaaaaaacactgcctatctacaaatgaacaacttgaaaactgaggacactgccgtgtactactgtgtgagacatgggaacttcggtaatagctacatatcctactgggcttactggggccaagggactctggtcaccgtctcctcaggtggtggtggttctggcggcggcggctccggtggtggtggttctcagactgttgtgactcaggaaccttcactcaccgtatcacctggtggaacagtcacactcacttgtggctcctcgactggggctgttacatctggcaactacccaaactgggtccaacaaaaaccaggtcaggcaccccgtggtctaataggtgggactaagttcctcgcccccggtactcctgccagattctcaggctccctgcttggaggcaaggctgccctcaccctctcaggggtacagccagaggatgaggcagaatattactgtgttctatggtacagcaaccgctgggtgttcggtggaggaaccaaactgactgtccta

SEQ ID NO: 779 - protein, 115 aa, Artificial
  unknown organism
QVQLVQSGAEVKKPGASVKVSCKASGYTFTEYTIQWVRQAPGKRLEWIGGIDPSNGGTMYNQKFNGRVTLTRDTSASTAYMELSSLTSEDTAVYYCTRAEAMDYWGQGTTVTVSS

SEQ ID NO: 780 - protein, 5 aa, Artificial
  unknown organism
EYTIQ

SEQ ID NO: 781 - protein, 17 aa, Artificial
  unknown organism
GIDPSNGGTMYNQKFNG

SEQ ID NO: 782 - protein, 6 aa, Artificial
  unknown organism
AEAMDY

SEQ ID NO: 783 - DNA, 345 bp, Artificial
  unknown organism
caggtgcagctggtccagtctggagctgaagtgaagaagcctggggcttcagtgaaggtatcctgcaaggcttctggatacacattcactgaatacaccatacaatgggtgaggcaggcccctggaaagagacttgagtggattggaggtattgatcctagcaatggtggtaccatgtataaccaaaaattcaatggcagggtcacattaactcgtgacacgtctgccagcacagcctacatggagctgagcagtctgacgtctgaggatactgcagtctattactgcacaagagcagaggctatggactactggggtcaaggaaccacggtcaccgtctcctca

SEQ ID NO: 784 - protein, 112 aa, Artificial; identical to SEQ ID NO: 770
  unknown organism

SEQ ID NO: 785 - protein, 16 aa, Artificial
  unknown organism
RSSESLVYRDGNTYLS

SEQ ID NO: 786 - protein, 7 aa, Artificial
  unknown organism
KVSNRDS

SEQ ID NO: 787 - protein, 9 aa, Artificial
  unknown organism
MQDTFWPWT

SEQ ID NO: 788 - DNA, 336 bp, Artificial; identical to SEQ ID NO: 774
  unknown organism

SEQ ID NO: 789 - protein, 242 aa, Artificial
  unknown organism
QVQLVQSGAEVKKPGASVKVSCKASGYTFTEYTIQWVRQAPGKRLEWIGGIDPSNGGTMYNQKFNGRVTLTRDTSASTAYMELSSLTSEDTAVYYCTRAEAMDYWGQGTTVTVSSGGGGSGGGGSGGGGSDVVMTQSPLSLPVTLGQPASISCRSSESLVYRDGNTYLSWFHQRPGQSPRRLIYKVSNRDSGVPDRFSGSGSGTEFTLKISRVEAEDVGVYYCMQDTFWPWTFGQGTKVDIK

SEQ ID NO: 790 - DNA, 726 bp, Artificial
  unknown organism
caggtgcagctggtccagtctggagctgaagtgaagaagcctggggcttcagtgaaggtatcctgcaaggcttctggatacacattcactgaatacaccatacaatgggtgaggcaggcccctggaaagagacttgagtggattggaggtattgatcctagcaatggtggtaccatgtataaccaaaaattcaatggcagggtcacattaactcgtgacacgtctgccagcacagcctacatggagctgagcagtctgacgtctgaggatactgcagtctattactgcacaagagcagaggctatggactactggggtcaaggaaccacggtcaccgtctcctcaggtggtggtggttctggcggcggcggctccggtggtggtggttctgatgtcgtgatgactcagtctccactctccctgcccgtcacccttggacagccggcctccatctcctgcaggtctagtgaaagtctcgtttacagggatggaaacacgtacttgagttggtttcaccagaggcccggccaatctccaaggcgcctaatttataaggtctctaaccgggactctggggtcccagacagattcagcggcagtgggtcaggcactgagttcacactgaaaatcagcagggtggaggctgaggatgttggggtttattactgcatgcaagatacattctggccttggactttcggccaagggaccaaagtggatatcaaa

SEQ ID NO: 791 - protein, 497 aa, Artificial
  unknown organism
QVQLVQSGAEVKKPGASVKVSCKASGYTFTEYTIQWVRQAPGKRLEWIGGIDPSNGGTMYNQKFNGRVTLTRDTSASTAYMELSSLTSEDTAVYYCTRAEAMDYWGQGTTVTVSSGGGGSGGGGSGGGGSDVVMTQSPLSLPVTLGQPASISCRSSESLVYRDGNTYLSWFHQRPGQSPRRLIYKVSNRDSGVPDRFSGSGSGTEFTLKISRVEAEDVGVYYCMQDTFWPWTFGQGTKVDIKSGGGGSEVQLVESGGGLVQPGGSLKLSCAASGFTFNKYAMNWVRQAPGKGLEWVARIRSKYNNYATYYADSVKDRFTISRDDSKNTAYLQMNNLKTEDTAVYYCVRHGNFGNSYISYWAYWGQGTLVTVSSGGGGSGGGGSGGGGSQTVVTQEPSLTVSPGGTVTLTCGSSTGAVTSGNYPNWVQQKPGQAPRGLIGGTKFLAPGTPARFSGSLLGGKAALTLSGVQPEDEAEYYCVLWYSNRWVFGGGTKLTVL

SEQ ID NO: 792 - DNA, 1491 bp, Artificial
  unknown organism
caggtgcagctggtccagtctggagctgaagtgaagaagcctggggcttcagtgaaggtatcctgcaaggcttctggatacacattcactgaatacaccatacaatgggtgaggcaggcccctggaaagagacttgagtggattggaggtattgatcctagcaatggtggtaccatgtataaccaaaaattcaatggcagggtcacattaactcgtgacacgtctgccagcacagcctacatggagctgagcagtctgacgtctgaggatactgcagtctattactgcacaagagcagaggctatggactactggggtcaaggaaccacggtcaccgtctcctcaggtggtggtggttctggcggcggcggctccggtggtggtggttctgatgtcgtgatgactcagtctccactctccctgcccgtcacccttggacagccggcctccatctcctgcaggtctagtgaaagtctcgtttacagggatggaaacacgtacttgagttggtttcaccagaggcccggccaatctccaaggcgcctaatttataaggtctctaaccgggactctggggtcccagacagattcagcggcagtgggtcaggcactgagttcacactgaaaatcagcagggtggaggctgaggatgttggggtttattactgcatgcaagatacattctggccttggactttcggccaagggaccaaagtggatatcaaatccggaggtggtggatccgaggtgcagctggtcgagtctggaggaggattggtgcagcctggagggtcattgaaactctcatgtgcagcctctggattcaccttcaataagtacgccatgaactgggtccgccaggctccaggaaagggtttggaatgggttgctcgcataagaagtaaatataataattatgcaacatattatgccgattcagtgaaagacaggttcaccatctccagagatgattcaaaaaacactgcctatctacaaatgaacaacttgaaaactgaggacactgccgtgtactactgtgtgagacatgggaacttcggtaatagctacatatcctactgggcttactggggccaagggactctggtcaccgtctcctcaggtggtggtggttctggcggcggcggctccggtggtggtggttctcagactgttgtgactcaggaaccttcactcaccgtatcacctggtggaacagtcacactcacttgtggctcctcgactggggctgttacatctggcaactacccaaactgggtccaacaaaaaccaggtcaggcaccccgtggtctaataggtgggactaagttcctcgcccccggtactcctgccagattctcaggctccctgcttggaggcaaggctgccctcaccctctcaggggtacagccagaggatgaggcagaatattactgtgttctatggtacagcaaccgctgggtgttcggtggaggaaccaaactgactgtccta

SEQ ID NO: 793 - protein, 115 aa, Artificial
  unknown organism
QVQLVQSGAEVKKPGASVKISCKASGYTFTEYTIQWVRQAPGERLEWIGGIDPINGGTMYNQKFNGRVTLTRDTSASTAYMELSSLTSEDTAVYYCTRAEAMDYWGQGTTVTVSS

SEQ ID NO: 794 - protein, 5 aa, Artificial
  unknown organism
EYTIQ

SEQ ID NO: 795 - protein, 17 aa, Artificial
  unknown organism
GIDPINGGTMYNQKFNG

SEQ ID NO: 796 - protein, 6 aa, Artificial
  unknown organism
AEAMDY

SEQ ID NO: 797 - DNA, 345 bp, Artificial
  unknown organism
caggtgcagctggtccagtctggagctgaagtgaagaagcctggggcttcagtgaagatatcctgcaaggcttctggatacacattcactgaatacaccatacaatgggtgaggcaggcccctggagagagacttgagtggattggaggtattgatcctatcaatggtggtaccatgtataaccaaaaattcaatggcagggtcacattaactcgtgacacgtctgccagcacagcctacatggagctgagcagtctgacgtctgaggatactgcagtctattactgcacaagagcagaggctatggactactggggtcaaggaaccacggtcaccgtctcctca

SEQ ID NO: 798 - protein, 112 aa, Artificial; identical to SEQ ID NO: 619
  unknown organism

SEQ ID NO: 799 - protein, 16 aa, Artificial
  unknown organism
RSSESLVYRDGNTYLS

SEQ ID NO: 800 - protein, 7 aa, Artificial
  unknown organism
KVSNRDS

SEQ ID NO: 801 - protein, 9 aa, Artificial
  unknown organism
MQHTFWPWT

SEQ ID NO: 802 - DNA, 336 bp, Artificial; identical to SEQ ID NO: 623
  unknown organism

SEQ ID NO: 803 - protein, 242 aa, Artificial
  unknown organism
QVQLVQSGAEVKKPGASVKISCKASGYTFTEYTIQWVRQAPGERLEWIGGIDPINGGTMYNQKFNGRVTLTRDTSASTAYMELSSLTSEDTAVYYCTRAEAMDYWGQGTTVTVSSGGGGSGGGGSGGGGSDVVMTQSPLSLPVTLGQPASISCRSSESLVYRDGNTYLSWFHQRPGQSPRRLIYKVSNRDSGVPDRFSGSGSGTEFTLKISRVEAEDVGVYYCMQHTFWPWTFGQGTKVDIK

SEQ ID NO: 804 - DNA, 726 bp, Artificial
  unknown organism
caggtgcagctggtccagtctggagctgaagtgaagaagcctggggcttcagtgaagatatcctgcaaggcttctggatacacattcactgaatacaccatacaatgggtgaggcaggcccctggagagagacttgagtggattggaggtattgatcctatcaatggtggtaccatgtataaccaaaaattcaatggcagggtcacattaactcgtgacacgtctgccagcacagcctacatggagctgagcagtctgacgtctgaggatactgcagtctattactgcacaagagcagaggctatggactactggggtcaaggaaccacggtcaccgtctcctcaggtggtggtggttctggcggcggcggctccggtggtggtggttctgatgtcgtgatgactcagtctccactctccctgcccgtcacccttggacagccggcctccatctcctgcaggtctagtgaaagtctcgtttacagggatggaaacacgtacttgagttggtttcaccagaggcccggccaatctccaaggcgcctaatttataaggtctctaaccgggactctggggtcccagacagattcagcggcagtgggtcaggcactgagttcacactgaaaatcagcagggtggaggctgaggatgttggggtttattactgcatgcaacatacattctggccttggactttcggccaagggaccaaagtggatatcaaa

SEQ ID NO: 805 - protein, 497 aa, Artificial
  unknown organism
QVQLVQSGAEVKKPGASVKISCKASGYTFTEYTIQWVRQAPGERLEWIGGIDPINGGTMYNQKFNGRVTLTRDTSASTAYMELSSLTSEDTAVYYCTRAEAMDYWGQGTTVTVSSGGGGSGGGGSGGGGSDVVMTQSPLSLPVTLGQPASISCRSSESLVYRDGNTYLSWFHQRPGQSPRRLIYKVSNRDSGVPDRFSGSGSGTEFTLKISRVEAEDVGVYYCMQHTFWPWTFGQGTKVDIKSGGGGSEVQLVESGGGLVQPGGSLKLSCAASGFTFNKYAMNWVRQAPGKGLEWVARIRSKYNNYATYYADSVKDRFTISRDDSKNTAYLQMNNLKTEDTAVYYCVRHGNFGNSYISYWAYWGQGTLVTVSSGGGGSGGGGSGGGGSQTVVTQEPSLTVSPGGTVTLTCGSSTGAVTSGNYPNWVQQKPGQAPRGLIGGTKFLAPGTPARFSGSLLGGKAALTLSGVQPEDEAEYYCVLWYSNRWVFGGGTKLTVL

SEQ ID NO: 806 - DNA, 1491 bp, Artificial
  unknown organism
caggtgcagctggtccagtctggagctgaagtgaagaagcctggggcttcagtgaagatatcctgcaaggcttctggatacacattcactgaatacaccatacaatgggtgaggcaggcccctggagagagacttgagtggattggaggtattgatcctatcaatggtggtaccatgtataaccaaaaattcaatggcagggtcacattaactcgtgacacgtctgccagcacagcctacatggagctgagcagtctgacgtctgaggatactgcagtctattactgcacaagagcagaggctatggactactggggtcaaggaaccacggtcaccgtctcctcaggtggtggtggttctggcggcggcggctccggtggtggtggttctgatgtcgtgatgactcagtctccactctccctgcccgtcacccttggacagccggcctccatctcctgcaggtctagtgaaagtctcgtttacagggatggaaacacgtacttgagttggtttcaccagaggcccggccaatctccaaggcgcctaatttataaggtctctaaccgggactctggggtcccagacagattcagcggcagtgggtcaggcactgagttcacactgaaaatcagcagggtggaggctgaggatgttggggtttattactgcatgcaacatacattctggccttggactttcggccaagggaccaaagtggatatcaaatccggaggtggtggatccgaggtgcagctggtcgagtctggaggaggattggtgcagcctggagggtcattgaaactctcatgtgcagcctctggattcaccttcaataagtacgccatgaactgggtccgccaggctccaggaaagggtttggaatgggttgctcgcataagaagtaaatataataattatgcaacatattatgccgattcagtgaaagacaggttcaccatctccagagatgattcaaaaaacactgcctatctacaaatgaacaacttgaaaactgaggacactgccgtgtactactgtgtgagacatgggaacttcggtaatagctacatatcctactgggcttactggggccaagggactctggtcaccgtctcctcaggtggtggtggttctggcggcggcggctccggtggtggtggttctcagactgttgtgactcaggaaccttcactcaccgtatcacctggtggaacagtcacactcacttgtggctcctcgactggggctgttacatctggcaactacccaaactgggtccaacaaaaaccaggtcaggcaccccgtggtctaataggtgggactaagttcctcgcccccggtactcctgccagattctcaggctccctgcttggaggcaaggctgccctcaccctctcaggggtacagccagaggatgaggcagaatattactgtgttctatggtacagcaaccgctgggtgttcggtggaggaaccaaactgactgtccta

SEQ ID NO: 807 - protein, 115 aa, Artificial
  unknown organism
QVQLVQSGAEVKKPGASVKVSCKASGYTFTEYTIQWVRQAPGKRLEWIGGIDPNNGGTMYNQKFNGRVTLTRDTSASTAYMELSSLTSEDTAVYYCTRAEAMDYWGQGTTVTVSS

SEQ ID NO: 808 - protein, 5 aa, Artificial
  unknown organism
EYTIQ

SEQ ID NO: 809 - protein, 17 aa, Artificial
  unknown organism
GIDPNNGGTMYNQKFNG

SEQ ID NO: 810 - protein, 6 aa, Artificial
  unknown organism
AEAMDY

SEQ ID NO: 811 - DNA, 345 bp, Artificial
  unknown organism
caggtgcagctggtccagtctggagctgaagtgaagaagcctggggcttcagtgaaggtatcctgcaaggcttctggatacacattcactgaatacaccatacaatgggtgaggcaggcccctggaaagagacttgagtggattggaggcattgatcctaacaatggtggtaccatgtataaccaaaaattcaatggcagggtcacattaactcgtgacacatctgccagcacagcctacatggagctgagcagtctgacgtctgaggatactgcagtctattactgcacaagagcagaggctatggactactggggtcaaggaaccacggtcaccgtctcctca

SEQ ID NO: 812 - protein, 112 aa, Artificial
  unknown organism
DVVMTQSPLSLPVTLGQPASISCRSSESLVYRDGNAYLSWFHQRPGQSPRRLIYKVSNRDSGVPDRFSGSGSGTEFTLKISRVEAEDVGVYYCMQHTFWPWTFGQGTKVDIK

SEQ ID NO: 813 - protein, 16 aa, Artificial
  unknown organism
RSSESLVYRDGNAYLS

SEQ ID NO: 814 - protein, 7 aa, Artificial
  unknown organism
KVSNRDS

SEQ ID NO: 815 - protein, 9 aa, Artificial
  unknown organism
MQHTFWPWT

SEQ ID NO: 816 - DNA, 336 bp, Artificial
  unknown organism
gatgtcgtgatgactcagtctccactctccctgcccgtcacccttggacagccggcctccatctcctgcaggtctagtgaaagtctcgtttacagggatggaaacgcgtacttgagttggtttcaccagaggcccggccaatctccaaggcgcctaatttataaggtctctaaccgggactctggggtcccagacagattcagcggcagtgggtcaggcactgagttcacactgaaaatcagcagggtggaggctgaggatgttggggtttattactgcatgcaacatacattctggccttggactttcggccaagggaccaaagtggatatcaaa

SEQ ID NO: 817 - protein, 242 aa, Artificial
  unknown organism
QVQLVQSGAEVKKPGASVKVSCKASGYTFTEYTIQWVRQAPGKRLEWIGGIDPNNGGTMYNQKFNGRVTLTRDTSASTAYMELSSLTSEDTAVYYCTRAEAMDYWGQGTTVTVSSGGGGSGGGGSGGGGSDVVMTQSPLSLPVTLGQPASISCRSSESLVYRDGNAYLSWFHQRPGQSPRRLIYKVSNRDSGVPDRFSGSGSGTEFTLKISRVEAEDVGVYYCMQHTFWPWTFGQGTKVDIK

SEQ ID NO: 818 - DNA, 726 bp, Artificial
  unknown organism
caggtgcagctggtccagtctggagctgaagtgaagaagcctggggcttcagtgaaggtatcctgcaaggcttctggatacacattcactgaatacaccatacaatgggtgaggcaggcccctggaaagagacttgagtggattggaggcattgatcctaacaatggtggtaccatgtataaccaaaaattcaatggcagggtcacattaactcgtgacacatctgccagcacagcctacatggagctgagcagtctgacgtctgaggatactgcagtctattactgcacaagagcagaggctatggactactggggtcaaggaaccacggtcaccgtctcctcaggtggtggtggttctggcggcggcggctccggtggtggtggttctgatgtcgtgatgactcagtctccactctccctgcccgtcacccttggacagccggcctccatctcctgcaggtctagtgaaagtctcgtttacagggatggaaacgcgtacttgagttggtttcaccagaggcccggccaatctccaaggcgcctaatttataaggtctctaaccgggactctggggtcccagacagattcagcggcagtgggtcaggcactgagttcacactgaaaatcagcagggtggaggctgaggatgttggggtttattactgcatgcaacatacattctggccttggactttcggccaagggaccaaagtggatatcaaa

SEQ ID NO: 819 - protein, 497 aa, Artificial
  unknown organism
QVQLVQSGAEVKKPGASVKVSCKASGYTFTEYTIQWVRQAPGKRLEWIGGIDPNNGGTMYNQKFNGRVTLTRDTSASTAYMELSSLTSEDTAVYYCTRAEAMDYWGQGTTVTVSSGGGGSGGGGSGGGGSDVVMTQSPLSLPVTLGQPASISCRSSESLVYRDGNAYLSWFHQRPGQSPRRLIYKVSNRDSGVPDRFSGSGSGTEFTLKISRVEAEDVGVYYCMQHTFWPWTFGQGTKVDIKSGGGGSEVQLVESGGGLVQPGGSLKLSCAASGFTFNKYAMNWVRQAPGKGLEWVARIRSKYNNYATYYADSVKDRFTISRDDSKNTAYLQMNNLKTEDTAVYYCVRHGNFGNSYISYWAYWGQGTLVTVSSGGGGSGGGGSGGGGSQTVVTQEPSLTVSPGGTVTLTCGSSTGAVTSGNYPNWVQQKPGQAPRGLIGGTKFLAPGTPARFSGSLLGGKAALTLSGVQPEDEAEYYCVLWYSNRWVFGGGTKLTVL

SEQ ID NO: 820 - DNA, 1491 bp, Artificial
  unknown organism
caggtgcagctggtccagtctggagctgaagtgaagaagcctggggcttcagtgaaggtatcctgcaaggcttctggatacacattcactgaatacaccatacaatgggtgaggcaggcccctggaaagagacttgagtggattggaggcattgatcctaacaatggtggtaccatgtataaccaaaaattcaatggcagggtcacattaactcgtgacacatctgccagcacagcctacatggagctgagcagtctgacgtctgaggatactgcagtctattactgcacaagagcagaggctatggactactggggtcaaggaaccacggtcaccgtctcctcaggtggtggtggttctggcggcggcggctccggtggtggtggttctgatgtcgtgatgactcagtctccactctccctgcccgtcacccttggacagccggcctccatctcctgcaggtctagtgaaagtctcgtttacagggatggaaacgcgtacttgagttggtttcaccagaggcccggccaatctccaaggcgcctaatttataaggtctctaaccgggactctggggtcccagacagattcagcggcagtgggtcaggcactgagttcacactgaaaatcagcagggtggaggctgaggatgttggggtttattactgcatgcaacatacattctggccttggactttcggccaagggaccaaagtggatatcaaatccggaggtggtggatccgaggtgcagctggtcgagtctggaggaggattggtgcagcctggagggtcattgaaactctcatgtgcagcctctggattcaccttcaataagtacgccatgaactgggtccgccaggctccaggaaagggtttggaatgggttgctcgcataagaagtaaatataataattatgcaacatattatgccgattcagtgaaagacaggttcaccatctccagagatgattcaaaaaacactgcctatctacaaatgaacaacttgaaaactgaggacactgccgtgtactactgtgtgagacatgggaacttcggtaatagctacatatcctactgggcttactggggccaagggactctggtcaccgtctcctcaggtggtggtggttctggcggcggcggctccggtggtggtggttctcagactgttgtgactcaggaaccttcactcaccgtatcacctggtggaacagtcacactcacttgtggctcctcgactggggctgttacatctggcaactacccaaactgggtccaacaaaaaccaggtcaggcaccccgtggtctaataggtgggactaagttcctcgcccccggtactcctgccagattctcaggctccctgcttggaggcaaggctgccctcaccctctcaggggtacagccagaggatgaggcagaatattactgtgttctatggtacagcaaccgctgggtgttcggtggaggaaccaaactgactgtccta

SEQ ID NO: 821 - protein, 115 aa, Artificial
  unknown organism
QVQLVQSGAEVKKPGASVKVSCKASGYTFTEYTIQWVRQAPGKRLEWIGGIDPNSGGTMYNQKFNGRVTLTRDTSASTAYMELSSLTSEDTAVYYCTRAEAMDYWGQGTTVTVSS

SEQ ID NO: 822 - protein, 5 aa, Artificial
  unknown organism
EYTIQ

SEQ ID NO: 823 - protein, 17 aa, Artificial
  unknown organism
GIDPNSGGTMYNQKFNG

SEQ ID NO: 824 - protein, 6 aa, Artificial
  unknown organism
AEAMDY

SEQ ID NO: 825 - DNA, 345 bp, Artificial
  unknown organism
caggtgcagctggtccagtctggagctgaagtgaagaagcctggggcttcagtgaaggtatcctgcaaggcttctggatacacattcactgaatacaccatacaatgggtgaggcaggcccctggaaaaagacttgagtggattggaggtattgatcctaacagtggtggtaccatgtataaccaaaaattcaatggcagggtcacattaactcgtgacacgtctgccagcacagcctacatggagctgagcagtctgacgtctgaggatactgcagtctattactgcacaagagcagaggctatggactactggggtcaaggaaccacggtcaccgtctcctca

SEQ ID NO: 826 - protein, 112 aa, Artificial; identical to SEQ ID NO: 619
  unknown organism

SEQ ID NO: 827 - protein, 16 aa, Artificial
  unknown organism
RSSESLVYRDGNTYLS

SEQ ID NO: 828 - protein, 7 aa, Artificial
  unknown organism
KVSNRDS

SEQ ID NO: 829 - protein, 9 aa, Artificial
  unknown organism
MQHTFWPWT

SEQ ID NO: 830 - DNA, 336 bp, Artificial; identical to SEQ ID NO: 623
  unknown organism

SEQ ID NO: 831 - protein, 242 aa, Artificial
  unknown organism
QVQLVQSGAEVKKPGASVKVSCKASGYTFTEYTIQWVRQAPGKRLEWIGGIDPNSGGTMYNQKFNGRVTLTRDTSASTAYMELSSLTSEDTAVYYCTRAEAMDYWGQGTTVTVSSGGGGSGGGGSGGGGSDVVMTQSPLSLPVTLGQPASISCRSSESLVYRDGNTYLSWFHQRPGQSPRRLIYKVSNRDSGVPDRFSGSGSGTEFTLKISRVEAEDVGVYYCMQHTFWPWTFGQGTKVDIK

SEQ ID NO: 832 - DNA, 726 bp, Artificial
  unknown organism
caggtgcagctggtccagtctggagctgaagtgaagaagcctggggcttcagtgaaggtatcctgcaaggcttctggatacacattcactgaatacaccatacaatgggtgaggcaggcccctggaaaaagacttgagtggattggaggtattgatcctaacagtggtggtaccatgtataaccaaaaattcaatggcagggtcacattaactcgtgacacgtctgccagcacagcctacatggagctgagcagtctgacgtctgaggatactgcagtctattactgcacaagagcagaggctatggactactggggtcaaggaaccacggtcaccgtctcctcaggtggtggtggttctggcggcggcggctccggtggtggtggttctgatgtcgtgatgactcagtctccactctccctgcccgtcacccttggacagccggcctccatctcctgcaggtctagtgaaagtctcgtttacagggatggaaacacgtacttgagttggtttcaccagaggcccggccaatctccaaggcgcctaatttataaggtctctaaccgggactctggggtcccagacagattcagcggcagtgggtcaggcactgagttcacactgaaaatcagcagggtggaggctgaggatgttggggtttattactgcatgcaacatacattctggccttggactttcggccaagggaccaaagtggatatcaaa

SEQ ID NO: 833 - protein, 497 aa, Artificial
  unknown organism
QVQLVQSGAEVKKPGASVKVSCKASGYTFTEYTIQWVRQAPGKRLEWIGGIDPNSGGTMYNQKFNGRVTLTRDTSASTAYMELSSLTSEDTAVYYCTRAEAMDYWGQGTTVTVSSGGGGSGGGGSGGGGSDVVMTQSPLSLPVTLGQPASISCRSSESLVYRDGNTYLSWFHQRPGQSPRRLIYKVSNRDSGVPDRFSGSGSGTEFTLKISRVEAEDVGVYYCMQHTFWPWTFGQGTKVDIKSGGGGSEVQLVESGGGLVQPGGSLKLSCAASGFTFNKYAMNWVRQAPGKGLEWVARIRSKYNNYATYYADSVKDRFTISRDDSKNTAYLQMNNLKTEDTAVYYCVRHGNFGNSYISYWAYWGQGTLVTVSSGGGGSGGGGSGGGGSQTVVTQEPSLTVSPGGTVTLTCGSSTGAVTSGNYPNWVQQKPGQAPRGLIGGTKFLAPGTPARFSGSLLGGKAALTLSGVQPEDEAEYYCVLWYSNRWVFGGGTKLTVL

SEQ ID NO: 834 - DNA, 1491 bp, Artificial
  unknown organism
caggtgcagctggtccagtctggagctgaagtgaagaagcctggggcttcagtgaaggtatcctgcaaggcttctggatacacattcactgaatacaccatacaatgggtgaggcaggcccctggaaaaagacttgagtggattggaggtattgatcctaacagtggtggtaccatgtataaccaaaaattcaatggcagggtcacattaactcgtgacacgtctgccagcacagcctacatggagctgagcagtctgacgtctgaggatactgcagtctattactgcacaagagcagaggctatggactactggggtcaaggaaccacggtcaccgtctcctcaggtggtggtggttctggcggcggcggctccggtggtggtggttctgatgtcgtgatgactcagtctccactctccctgcccgtcacccttggacagccggcctccatctcctgcaggtctagtgaaagtctcgtttacagggatggaaacacgtacttgagttggtttcaccagaggcccggccaatctccaaggcgcctaatttataaggtctctaaccgggactctggggtcccagacagattcagcggcagtgggtcaggcactgagttcacactgaaaatcagcagggtggaggctgaggatgttggggtttattactgcatgcaacatacattctggccttggactttcggccaagggaccaaagtggatatcaaatccggaggtggtggatccgaggtgcagctggtcgagtctggaggaggattggtgcagcctggagggtcattgaaactctcatgtgcagcctctggattcaccttcaataagtacgccatgaactgggtccgccaggctccaggaaagggtttggaatgggttgctcgcataagaagtaaatataataattatgcaacatattatgccgattcagtgaaagacaggttcaccatctccagagatgattcaaaaaacactgcctatctacaaatgaacaacttgaaaactgaggacactgccgtgtactactgtgtgagacatgggaacttcggtaatagctacatatcctactgggcttactggggccaagggactctggtcaccgtctcctcaggtggtggtggttctggcggcggcggctccggtggtggtggttctcagactgttgtgactcaggaaccttcactcaccgtatcacctggtggaacagtcacactcacttgtggctcctcgactggggctgttacatctggcaactacccaaactgggtccaacaaaaaccaggtcaggcaccccgtggtctaataggtgggactaagttcctcgcccccggtactcctgccagattctcaggctccctgcttggaggcaaggctgccctcaccctctcaggggtacagccagaggatgaggcagaatattactgtgttctatggtacagcaaccgctgggtgttcggtggaggaaccaaactgactgtccta

SEQ ID NO: 835 - protein, 115 aa, Artificial; identical to SEQ ID NO: 681
  unknown organism

SEQ ID NO: 836 - protein, 5 aa, Artificial
  unknown organism
EYTIH

SEQ ID NO: 837 - protein, 17 aa, Artificial
  unknown organism
GIDPSSGGTMYNQKFKG

SEQ ID NO: 838 - protein, 6 aa, Artificial
  unknown organism
AEAMDY

SEQ ID NO: 839 - DNA, 345 bp, Artificial
  unknown organism
caggtgcagctggtccagtctggagctgaagtgaagaagcctggggcttcagtgaaggtatcctgcaagacttctggatacacattcactgaatacaccatacactgggtgaggcaggcccctggaaagagactagagtggattggagggattgatcctagcagtggtggtaccatgtataaccaaaaattcaagggctgggtcacactaactcgtgacacgtctgccagcacagcctacatggagctgaggagtctgaggtctgaggatactgcagtctattactgcacaagagcagaggctatggactactggggtcaaggaaccacggtcaccgtctcctca

SEQ ID NO: 840 - protein, 112 aa, Artificial
  unknown organism
DVVMTQSPLSLPVTLGQPASISCRSSESLVYRDGNTYLSWFHQRPGQSPRRLIYKVSNRDSGVPDRFSGSGSGTEFTLKISRVEAEDVGVYYCMQHTFWPWNFGQGTKVDIK

SEQ ID NO: 841 - protein, 16 aa, Artificial
  unknown organism
RSSESLVYRDGNTYLS

SEQ ID NO: 842 - protein, 7 aa, Artificial
  unknown organism
KVSNRDS

SEQ ID NO: 843 - protein, 9 aa, Artificial
  unknown organism
MQHTFWPWN

SEQ ID NO: 844 - DNA, 336 bp, Artificial
  unknown organism
gatgtcgtgatgactcagtctccactctccctgcccgtcactcttggacagccggcctccatctcctgcaggtctagtgaaagtctcgtttacagggatggaaacacgtacttgagttggtttcaccagaggcccggccaatctccaaggcgcctaatttataaggtctctaaccgggactctggggtcccagacagattcagcggcagtgggtcaggcactgagttcacactgaaaatcagcagggtggaggctgaggatgttggggtttattactgcatgcaacatacattctggccttggaatttcggccaagggaccaaagtggatatcaaa

SEQ ID NO: 845 - protein, 242 aa, Artificial
  unknown organism
QVQLVQSGAEVKKPGASVKVSCKTSGYTFTEYTIHWVRQAPGKRLEWIGGIDPSSGGTMYNQKFKGWVTLTRDTSASTAYMELRSLRSEDTAVYYCTRAEAMDYWGQGTTVTVSSGGGGSGGGGSGGGGSDVVMTQSPLSLPVTLGQPASISCRSSESLVYRDGNTYLSWFHQRPGQSPRRLIYKVSNRDSGVPDRFSGSGSGTEFTLKISRVEAEDVGVYYCMQHTFWPWNFGQGTKVDIK

SEQ ID NO: 846 - DNA, 726 bp, Artificial
  unknown organism
caggtgcagctggtccagtctggagctgaagtgaagaagcctggggcttcagtgaaggtatcctgcaagacttctggatacacattcactgaatacaccatacactgggtgaggcaggcccctggaaagagactagagtggattggagggattgatcctagcagtggtggtaccatgtataaccaaaaattcaagggctgggtcacactaactcgtgacacgtctgccagcacagcctacatggagctgaggagtctgaggtctgaggatactgcagtctattactgcacaagagcagaggctatggactactggggtcaaggaaccacggtcaccgtctcctcaggtggtggtggttctggcggcggcggctccggtggtggtggttctgatgtcgtgatgactcagtctccactctccctgcccgtcactcttggacagccggcctccatctcctgcaggtctagtgaaagtctcgtttacagggatggaaacacgtacttgagttggtttcaccagaggcccggccaatctccaaggcgcctaatttataaggtctctaaccgggactctggggtcccagacagattcagcggcagtgggtcaggcactgagttcacactgaaaatcagcagggtggaggctgaggatgttggggtttattactgcatgcaacatacattctggccttggaatttcggccaagggaccaaagtggatatcaaa

SEQ ID NO: 847 - protein, 497 aa, Artificial
  unknown organism
QVQLVQSGAEVKKPGASVKVSCKTSGYTFTEYTIHWVRQAPGKRLEWIGGIDPSSGGTMYNQKFKGWVTLTRDTSASTAYMELRSLRSEDTAVYYCTRAEAMDYWGQGTTVTVSSGGGGSGGGGSGGGGSDVVMTQSPLSLPVTLGQPASISCRSSESLVYRDGNTYLSWFHQRPGQSPRRLIYKVSNRDSGVPDRFSGSGSGTEFTLKISRVEAEDVGVYYCMQHTFWPWNFGQGTKVDIKSGGGGSEVQLVESGGGLVQPGGSLKLSCAASGFTFNKYAMNWVRQAPGKGLEWVARIRSKYNNYATYYADSVKDRFTISRDDSKNTAYLQMNNLKTEDTAVYYCVRHGNFGNSYISYWAYWGQGTLVTVSSGGGGSGGGGSGGGGSQTVVTQEPSLTVSPGGTVTLTCGSSTGAVTSGNYPNWVQQKPGQAPRGLIGGTKFLAPGTPARFSGSLLGGKAALTLSGVQPEDEAEYYCVLWYSNRWVFGGGTKLTVL

SEQ ID NO: 848 - DNA, 1491 bp, Artificial
  unknown organism
caggtgcagctggtccagtctggagctgaagtgaagaagcctggggcttcagtgaaggtatcctgcaagacttctggatacacattcactgaatacaccatacactgggtgaggcaggcccctggaaagagactagagtggattggagggattgatcctagcagtggtggtaccatgtataaccaaaaattcaagggctgggtcacactaactcgtgacacgtctgccagcacagcctacatggagctgaggagtctgaggtctgaggatactgcagtctattactgcacaagagcagaggctatggactactggggtcaaggaaccacggtcaccgtctcctcaggtggtggtggttctggcggcggcggctccggtggtggtggttctgatgtcgtgatgactcagtctccactctccctgcccgtcactcttggacagccggcctccatctcctgcaggtctagtgaaagtctcgtttacagggatggaaacacgtacttgagttggtttcaccagaggcccggccaatctccaaggcgcctaatttataaggtctctaaccgggactctggggtcccagacagattcagcggcagtgggtcaggcactgagttcacactgaaaatcagcagggtggaggctgaggatgttggggtttattactgcatgcaacatacattctggccttggaatttcggccaagggaccaaagtggatatcaaatccggaggtggtggatccgaggtgcagctggtcgagtctggaggaggattggtgcagcctggagggtcattgaaactctcatgtgcagcctctggattcaccttcaataagtacgccatgaactgggtccgccaggctccaggaaagggtttggaatgggttgctcgcataagaagtaaatataataattatgcaacatattatgccgattcagtgaaagacaggttcaccatctccagagatgattcaaaaaacactgcctatctacaaatgaacaacttgaaaactgaggacactgccgtgtactactgtgtgagacatgggaacttcggtaatagctacatatcctactgggcttactggggccaagggactctggtcaccgtctcctcaggtggtggtggttctggcggcggcggctccggtggtggtggttctcagactgttgtgactcaggaaccttcactcaccgtatcacctggtggaacagtcacactcacttgtggctcctcgactggggctgttacatctggcaactacccaaactgggtccaacaaaaaccaggtcaggcaccccgtggtctaataggtgggactaagttcctcgcccccggtactcctgccagattctcaggctccctgcttggaggcaaggctgccctcaccctctcaggggtacagccagaggatgaggcagaatattactgtgttctatggtacagcaaccgctgggtgttcggtggaggaaccaaactgactgtccta

SEQ ID NO: 849 - protein, 115 aa, Artificial
  unknown organism
QVQLVQSGAEVKKPGASVKVSCKTSGYTFTDYTIHWVRQAPGKRLEWIGGIDPSSGGTMYNQKFMGWVTLTRDTSASTAYMELRSLRSEDTAVYYCTRAEAMDYWGQGTTVTVSS

SEQ ID NO: 850 - protein, 5 aa, Artificial
  unknown organism
DYTIH

SEQ ID NO: 851 - protein, 17 aa, Artificial
  unknown organism
GIDPSSGGTMYNQKFMG

SEQ ID NO: 852 - protein, 6 aa, Artificial
  unknown organism
AEAMDY

SEQ ID NO: 853 - DNA, 345 bp, Artificial
  unknown organism
caggtgcagctggtccagtctggagctgaagtgaagaagcctggggcttcagtgaaggtatcctgcaagacttctggatacacattcactgattacaccatacactgggtgaggcaggcccctggaaagagactagagtggattggaggtattgatcctagcagtggtggtaccatgtataaccaaaaattcatgggctgggtcacgttaactcgtgacacgtctgccagcacagcctacatggagctgaggagtctgaggtctgaggatactgcagtctattactgcacaagagcagaggctatggactactggggtcaaggaaccacggtcaccgtctcctca

SEQ ID NO: 854 - protein, 112 aa, Artificial
  unknown organism
DVVMTQSPLSLPVTLGQPASISCRSSESLVYRDGNTYLSWFHQRPGQSPRRLIYKVSNRDSGVPDRFSGSGSDTEFTLKISRVEAEDVGVYYCMQHTFWPWTFGQGTKVDIK

SEQ ID NO: 855 - protein, 16 aa, Artificial
  unknown organism
RSSESLVYRDGNTYLS

SEQ ID NO: 856 - protein, 7 aa, Artificial
  unknown organism
KVSNRDS

SEQ ID NO: 857 - protein, 9 aa, Artificial
  unknown organism
MQHTFWPWT

SEQ ID NO: 858 - DNA, 336 bp, Artificial
  unknown organism
gatgtcgtgatgactcagtctccactctccctgcccgtcacccttggacagccggcctccatctcctgcaggtctagtgaaagtctcgtttacagggatggaaacacgtacttgagttggtttcaccagaggcccggccaatctccaaggcgcctaatttataaggtctctaaccgggactctggggtcccagacagattcagcggcagtgggtcggacactgagttcacactgaaaatcagcagggtggaggctgaggatgttggggtttattactgcatgcaacatacattctggccttggactttcggccaagggaccaaagtggatatcaaa

SEQ ID NO: 859 - protein, 242 aa, Artificial
  unknown organism
QVQLVQSGAEVKKPGASVKVSCKTSGYTFTDYTIHWVRQAPGKRLEWIGGIDPSSGGTMYNQKFMGWVTLTRDTSASTAYMELRSLRSEDTAVYYCTRAEAMDYWGQGTTVTVSSGGGGSGGGGSGGGGSDVVMTQSPLSLPVTLGQPASISCRSSESLVYRDGNTYLSWFHQRPGQSPRRLIYKVSNRDSGVPDRFSGSGSDTEFTLKISRVEAEDVGVYYCMQHTFWPWTFGQGTKVDIK

SEQ ID NO: 860 - DNA, 726 bp, Artificial
  unknown organism
caggtgcagctggtccagtctggagctgaagtgaagaagcctggggcttcagtgaaggtatcctgcaagacttctggatacacattcactgattacaccatacactgggtgaggcaggcccctggaaagagactagagtggattggaggtattgatcctagcagtggtggtaccatgtataaccaaaaattcatgggctgggtcacgttaactcgtgacacgtctgccagcacagcctacatggagctgaggagtctgaggtctgaggatactgcagtctattactgcacaagagcagaggctatggactactggggtcaaggaaccacggtcaccgtctcctcaggtggtggtggttctggcggcggcggctccggtggtggtggttctgatgtcgtgatgactcagtctccactctccctgcccgtcacccttggacagccggcctccatctcctgcaggtctagtgaaagtctcgtttacagggatggaaacacgtacttgagttggtttcaccagaggcccggccaatctccaaggcgcctaatttataaggtctctaaccgggactctggggtcccagacagattcagcggcagtgggtcggacactgagttcacactgaaaatcagcagggtggaggctgaggatgttggggtttattactgcatgcaacatacattctggccttggactttcggccaagggaccaaagtggatatcaaa

SEQ ID NO: 861 - protein, 497 aa, Artificial
  unknown organism
QVQLVQSGAEVKKPGASVKVSCKTSGYTFTDYTIHWVRQAPGKRLEWIGGIDPSSGGTMYNQKFMGWVTLTRDTSASTAYMELRSLRSEDTAVYYCTRAEAMDYWGQGTTVTVSSGGGGSGGGGSGGGGSDVVMTQSPLSLPVTLGQPASISCRSSESLVYRDGNTYLSWFHQRPGQSPRRLIYKVSNRDSGVPDRFSGSGSDTEFTLKISRVEAEDVGVYYCMQHTFWPWTFGQGTKVDIKSGGGGSEVQLVESGGGLVQPGGSLKLSCAASGFTFNKYAMNWVRQAPGKGLEWVARIRSKYNNYATYYADSVKDRFTISRDDSKNTAYLQMNNLKTEDTAVYYCVRHGNFGNSYISYWAYWGQGTLVTVSSGGGGSGGGGSGGGGSQTVVTQEPSLTVSPGGTVTLTCGSSTGAVTSGNYPNWVQQKPGQAPRGLIGGTKFLAPGTPARFSGSLLGGKAALTLSGVQPEDEAEYYCVLWYSNRWVFGGGTKLTVL

SEQ ID NO: 862 - DNA, 1491 bp, Artificial
  unknown organism
caggtgcagctggtccagtctggagctgaagtgaagaagcctggggcttcagtgaaggtatcctgcaagacttctggatacacattcactgattacaccatacactgggtgaggcaggcccctggaaagagactagagtggattggaggtattgatcctagcagtggtggtaccatgtataaccaaaaattcatgggctgggtcacgttaactcgtgacacgtctgccagcacagcctacatggagctgaggagtctgaggtctgaggatactgcagtctattactgcacaagagcagaggctatggactactggggtcaaggaaccacggtcaccgtctcctcaggtggtggtggttctggcggcggcggctccggtggtggtggttctgatgtcgtgatgactcagtctccactctccctgcccgtcacccttggacagccggcctccatctcctgcaggtctagtgaaagtctcgtttacagggatggaaacacgtacttgagttggtttcaccagaggcccggccaatctccaaggcgcctaatttataaggtctctaaccgggactctggggtcccagacagattcagcggcagtgggtcggacactgagttcacactgaaaatcagcagggtggaggctgaggatgttggggtttattactgcatgcaacatacattctggccttggactttcggccaagggaccaaagtggatatcaaatccggaggtggtggatccgaggtgcagctggtcgagtctggaggaggattggtgcagcctggagggtcattgaaactctcatgtgcagcctctggattcaccttcaataagtacgccatgaactgggtccgccaggctccaggaaagggtttggaatgggttgctcgcataagaagtaaatataataattatgcaacatattatgccgattcagtgaaagacaggttcaccatctccagagatgattcaaaaaacactgcctatctacaaatgaacaacttgaaaactgaggacactgccgtgtactactgtgtgagacatgggaacttcggtaatagctacatatcctactgggcttactggggccaagggactctggtcaccgtctcctcaggtggtggtggttctggcggcggcggctccggtggtggtggttctcagactgttgtgactcaggaaccttcactcaccgtatcacctggtggaacagtcacactcacttgtggctcctcgactggggctgttacatctggcaactacccaaactgggtccaacaaaaaccaggtcaggcaccccgtggtctaataggtgggactaagttcctcgcccccggtactcctgccagattctcaggctccctgcttggaggcaaggctgccctcaccctctcaggggtacagccagaggatgaggcagaatattactgtgttctatggtacagcaaccgctgggtgttcggtggaggaaccaaactgactgtccta

SEQ ID NO: 863 - protein, 500 aa, Artificial
  unknown organism
DIVLTQSPASLPVSLGQRATISCRASQSVSSSTYSYIHWYQQKPGQPPKLLITYASNLESGVPARFSGSGSGTDFTLDIHPVEEDDSSTYYCQHSWEIPFTFGSGTKLEIKGGGGSGGGGSGGGGSQVQLQQSGPDLVKPGASVKMSCKASGHTFTDCVIIWVKQRAGQGLEWIGQIYPGTGRSYYNEIFKGKATLTADKSSNTVHIQLSSLTSEDSAVYFCALSTLIHGTWFSYWGQGTLVTVSSGGGGSEVQLVESGGGLVQPGGSLKLSCAASGFTFNKYAMNWVRQAPGKGLEWVARIRSKYNNYATYYADSVKDRFTISRDDSKNTAYLQMNNLKTEDTAVYYCVRHGNFGNSYISYWAYWGQGTLVTVSSGGGGSGGGGSGGGGSQTVVTQEPSLTVSPGGTVTLTCGSSTGAVTSGNYPNWVQQKPGQAPRGLIGGTKFLAPGTPARFSGSLLGGKAALTLSGVQPEDEAEYYCVLWYSNRWVFGGGTKLTVL

SEQ ID NO: 864 - DNA, 1500 bp, Artificial
  unknown organism
gacattgtgctgacacagtctcctgcttccttacctgtgtctctggggcagagggccaccatctcatgcagggccagccaaagtgtcagttcatctacttatagttatatacactggtaccaacagaaaccaggacagccacccaaactcctcatcacgtatgcatccaacctagaatctggggtccctgccaggttcagtggcagtgggtctgggacagacttcaccctcgacatccatcctgtggaggaggatgattcttcaacatattactgtcagcacagttgggagattccatttacgttcggctcggggacaaagttggaaataaaaggtggtggtggttctggcggcggcggctccggtggtggtggttctcaggttcagctgcagcagtctggacctgatctggtgaagcctggggcctcagtgaagatgtcctgcaaggcttctggacacactttcactgactgtgttataatctgggtgaaacagagagctggacagggccttgagtggattggacagatttatccagggactggtcgttcttactacaatgagattttcaagggcaaggccacactgactgcagacaaatcctccaacacagtccacattcaactcagcagcctgacatctgaggactctgcggtctatttctgtgccctatctactcttattcacgggacctggttttcttattggggccaagggactctggtcactgtctcttccggaggtggtggatccgaggtgcagctggtcgagtctggaggaggattggtgcagcctggagggtcattgaaactctcatgtgcagcctctggattcaccttcaataagtacgccatgaactgggtccgccaggctccaggaaagggtttggaatgggttgctcgcataagaagtaaatataataattatgcaacatattatgccgattcagtgaaagacaggttcaccatctccagagatgattcaaaaaacactgcctatctacaaatgaacaacttgaaaactgaggacactgccgtgtactactgtgtgagacatgggaacttcggtaatagctacatatcctactgggcttactggggccaagggactctggtcaccgtctcctcaggtggtggtggttctggcggcggcggctccggtggtggtggttctcagactgttgtgactcaggaaccttcactcaccgtatcacctggtggaacagtcacactcacttgtggctcctcgactggggctgttacatctggcaactacccaaactgggtccaacaaaaaccaggtcaggcaccccgtggtctaataggtgggactaagttcctcgcccccggtactcctgccagattctcaggctccctgcttggaggcaaggctgccctcaccctctcaggggtacagccagaggatgaggcagaatattactgtgttctatggtacagcaaccgctgggtgttcggtggaggaaccaaactgactgtccta

SEQ ID NO: 865 - protein, 119 aa, Artificial
  unknown organism
EVQLVESGGGLIQPGGSLRLSCAASGFTVSSNDMSWVRQAPGKGLEWVSLIYSGGSTYYADSVKGRFTISRDNSKNTLYLQMNSLRAEDTAVYYCALSTLIHGTWFSYWGQGTLVTVSS

SEQ ID NO: 866 - protein, 5 aa, Artificial
  unknown organism
SNDMS

SEQ ID NO: 867 - protein, 16 aa, Artificial
  unknown organism
LIYSGGSTYYADSVKG

SEQ ID NO: 868 - protein, 11 aa, Artificial
  unknown organism
STLIHGTWFSY

SEQ ID NO: 869 - DNA, 357 bp, Artificial
  unknown organism
gaggtgcagctggtcgagtctgggggaggcttgatccagcctggggggtccctgagactctcctgtgcagcctctgggttcaccgtcagtagcaacgacatgagctgggtccgccaggctccagggaaggggctggagtgggtctcacttatttatagcggtggtagcacatactacgcagactccgtgaagggccgattcaccatctccagagacaattccaagaacacgctgtatctgcaaatgaacagcctgagagctgaggacacggccgtgtattactgtgcgctatctactcttattcacgggacctggttttcttattggggccaagggactctggtcaccgtctcctca

SEQ ID NO: 870 - protein, 111 aa, Artificial
  unknown organism
DIVLTQSPDSLAVSLGERATINCRASQSVSSSTYSYIHWYQQKPGQPPKLLITYASNLESGVPDRFSGSGSGTDFTLTISSVQEEDAAVYYCQHSWEIPFTFGQGTKLEIK

SEQ ID NO: 871 - protein, 15 aa, Artificial
  unknown organism
RASQSVSSSTYSYIH

SEQ ID NO: 872 - protein, 7 aa, Artificial
  unknown organism
YASNLES

SEQ ID NO: 873 - protein, 9 aa, Artificial
  unknown organism
QHSWEIPFT

SEQ ID NO: 874 - DNA, 333 bp, Artificial
  unknown organism
gacatcgtgctgacacagtctcctgattccttagctgtgtctctgggggagagggccaccatcaactgcagggccagccaaagtgtcagttcatctacttatagttatatacactggtaccaacagaaaccaggacagccacccaaactcctcatcacttatgcatccaacctagaatctggggtccctgataggttcagtggcagtgggtctgggacagacttcaccctcactatctcttctgtgcaggaggaagatgctgcagtatattactgtcagcacagttgggagattccatttacgttcggccaggggacaaagttggaaataaaa

SEQ ID NO: 875 - protein, 245 aa, Artificial
  unknown organism
EVQLVESGGGLIQPGGSLRLSCAASGFTVSSNDMSWVRQAPGKGLEWVSLIYSGGSTYYADSVKGRFTISRDNSKNTLYLQMNSLRAEDTAVYYCALSTLIHGTWFSYWGQGTLVTVSSGGGGSGGGGSGGGGSDIVLTQSPDSLAVSLGERATINCRASQSVSSSTYSYIHWYQQKPGQPPKLLITYASNLESGVPDRFSGSGSGTDFTLTISSVQEEDAAVYYCQHSWEIPFTFGQGTKLEIK

SEQ ID NO: 876 - DNA, 735 bp, Artificial
  unknown organism
gaggtgcagctggtcgagtctgggggaggcttgatccagcctggggggtccctgagactctcctgtgcagcctctgggttcaccgtcagtagcaacgacatgagctgggtccgccaggctccagggaaggggctggagtgggtctcacttatttatagcggtggtagcacatactacgcagactccgtgaagggccgattcaccatctccagagacaattccaagaacacgctgtatctgcaaatgaacagcctgagagctgaggacacggccgtgtattactgtgcgctatctactcttattcacgggacctggttttcttattggggccaagggactctggtcaccgtctcctcaggtggtggtggttctggcggcggcggctccggtggtggtggttctgacatcgtgctgacacagtctcctgattccttagctgtgtctctgggggagagggccaccatcaactgcagggccagccaaagtgtcagttcatctacttatagttatatacactggtaccaacagaaaccaggacagccacccaaactcctcatcacttatgcatccaacctagaatctggggtccctgataggttcagtggcagtgggtctgggacagacttcaccctcactatctcttctgtgcaggaggaagatgctgcagtatattactgtcagcacagttgggagattccatttacgttcggccaggggacaaagttggaaataaaa

SEQ ID NO: 877 - protein, 500 aa, Artificial
  unknown organism
EVQLVESGGGLIQPGGSLRLSCAASGFTVSSNDMSWVRQAPGKGLEWVSLIYSGGSTYYADSVKGRFTISRDNSKNTLYLQMNSLRAEDTAVYYCALSTLIHGTWFSYWGQGTLVTVSSGGGGSGGGGSGGGGSDIVLTQSPDSLAVSLGERATINCRASQSVSSSTYSYIHWYQQKPGQPPKLLITYASNLESGVPDRFSGSGSGTDFTLTISSVQEEDAAVYYCQHSWEIPFTFGQGTKLEIKSGGGGSEVQLVESGGGLVQPGGSLKLSCAASGFTFNKYAMNWVRQAPGKGLEWVARIRSKYNNYATYYADSVKDRFTISRDDSKNTAYLQMNNLKTEDTAVYYCVRHGNFGNSYISYWAYWGQGTLVTVSSGGGGSGGGGSGGGGSQTVVTQEPSLTVSPGGTVTLTCGSSTGAVTSGYYPNWVQQKPGQAPRGLIGGTKFLAPGTPARFSGSLLGGKAALTLSGVQPEDEAEYYCALWYSNRWVFGGGTKLTVL

SEQ ID NO: 878 - DNA, 1500 bp, Artificial
  unknown organism
gaggtgcagctggtcgagtctgggggaggcttgatccagcctggggggtccctgagactctcctgtgcagcctctgggttcaccgtcagtagcaacgacatgagctgggtccgccaggctccagggaaggggctggagtgggtctcacttatttatagcggtggtagcacatactacgcagactccgtgaagggccgattcaccatctccagagacaattccaagaacacgctgtatctgcaaatgaacagcctgagagctgaggacacggccgtgtattactgtgcgctatctactcttattcacgggacctggttttcttattggggccaagggactctggtcaccgtctcctcaggtggtggtggttctggcggcggcggctccggtggtggtggttctgacatcgtgctgacacagtctcctgattccttagctgtgtctctgggggagagggccaccatcaactgcagggccagccaaagtgtcagttcatctacttatagttatatacactggtaccaacagaaaccaggacagccacccaaactcctcatcacttatgcatccaacctagaatctggggtccctgataggttcagtggcagtgggtctgggacagacttcaccctcactatctcttctgtgcaggaggaagatgctgcagtatattactgtcagcacagttgggagattccatttacgttcggccaggggacaaagttggaaataaaatccggaggtggtggatccgaggtgcagctggtcgagtctggaggaggattggtgcagcctggagggtcattgaaactctcatgtgcagcctctggattcaccttcaataagtacgccatgaactgggtccgccaggctccaggaaagggtttggaatgggttgctcgcataagaagtaaatataataattatgcaacatattatgccgattcagtgaaagacaggttcaccatctccagagatgattcaaaaaacactgcctatctacaaatgaacaacttgaaaactgaggacactgccgtgtactactgtgtgagacatgggaacttcggtaatagctacatatcctactgggcttactggggccaagggactctggtcaccgtctcctcaggtggtggtggttctggcggcggcggctccggtggtggtggttctcagactgttgtgactcaggaaccttcactcaccgtatcacctggtggaacagtcacactcacttgtggctcctcgactggggctgttacatctggctactacccaaactgggtccaacaaaaaccaggtcaggcaccccgtggtctaataggtgggactaagttcctcgcccccggtactcctgccagattctcaggctccctgcttggaggcaaggctgccctcaccctctcaggggtacagccagaggatgaggcagaatattactgtgctctatggtacagcaaccgctgggtgttcggtggaggaaccaaactgactgtccta

SEQ ID NO: 879 - protein, 500 aa, Artificial
  unknown organism
EVQLVESGGGLIQPGGSLRLSCAASGFTVSSNDMSWVRQAPGKGLEWVSLIYSGGSTYYADSVKGRFTISRDNSKNTLYLQMNSLRAEDTAVYYCALSTLIHGTWFSYWGQGTLVTVSSGGGGSGGGGSGGGGSDIVLTQSPDSLAVSLGERATINCRASQSVSSSTYSYIHWYQQKPGQPPKLLITYASNLESGVPDRFSGSGSGTDFTLTISSVQEEDAAVYYCQHSWEIPFTFGQGTKLEIKSGGGGSEVQLVESGGGLVQPGGSLKLSCAASGFTFNSYAMNWVRQAPGKGLEWVARIRSKYNNYATYYADSVKGRFTISRDDSKNTAYLQMNNLKTEDTAVYYCVRHGNFGNSYVSWWAYWGQGTLVTVSSGGGGSGGGGSGGGGSQTVVTQEPSLTVSPGGTVTLTCGSSTGAVTSGNYPNWVQQKPGQAPRGLIGGTKFLAPGTPARFSGSLLGGKAALTLSGVQPEDEAEYYCVLWYSNRWVFGGGTKLTVL

SEQ ID NO: 880 - DNA, 1500 bp, Artificial
  unknown organism
gaggtgcagctggtcgagtctgggggaggcttgatccagcctggggggtccctgagactctcctgtgcagcctctgggttcaccgtcagtagcaacgacatgagctgggtccgccaggctccagggaaggggctggagtgggtctcacttatttatagcggtggtagcacatactacgcagactccgtgaagggccgattcaccatctccagagacaattccaagaacacgctgtatctgcaaatgaacagcctgagagctgaggacacggccgtgtattactgtgcgctatctactcttattcacgggacctggttttcttattggggccaagggactctggtcaccgtctcctcaggtggtggtggttctggcggcggcggctccggtggtggtggttctgacatcgtgctgacacagtctcctgattccttagctgtgtctctgggggagagggccaccatcaactgcagggccagccaaagtgtcagttcatctacttatagttatatacactggtaccaacagaaaccaggacagccacccaaactcctcatcacttatgcatccaacctagaatctggggtccctgataggttcagtggcagtgggtctgggacagacttcaccctcactatctcttctgtgcaggaggaagatgctgcagtatattactgtcagcacagttgggagattccatttacgttcggccaggggacaaagttggaaataaaatccggaggtggtggatccgaggtgcagctggtcgagtctggaggaggattggtgcagcctggagggtcattgaaactctcatgtgcagcctctggattcaccttcaatagctacgccatgaactgggtccgccaggctccaggaaagggtttggaatgggttgctcgcataagaagtaaatataataattatgcaacatattatgccgattcagtgaaaggcaggttcaccatctccagagatgattcaaaaaacactgcctatctacaaatgaacaacttgaaaactgaggacactgccgtgtactactgtgtgagacatgggaacttcggtaatagctacgtttcctggtgggcttactggggccaagggactctggtcaccgtctcctcaggtggtggtggttctggcggcggcggctccggtggtggtggttctcagactgttgtgactcaggaaccttcactcaccgtatcacctggtggaacagtcacactcacttgtggctcctcgactggggctgttacatctggcaactacccaaactgggtccaacaaaaaccaggtcaggcaccccgtggtctaataggtgggactaagttcctcgcccccggtactcctgccagattctcaggctccctgcttggaggcaaggctgccctcaccctctcaggggtacagccagaggatgaggcagaatattactgtgttctatggtacagcaaccgctgggtgttcggtggaggaaccaaactgactgtccta

SEQ ID NO: 881 - protein, 500 aa, Artificial
  unknown organism
EVQLVESGGGLIQPGGSLRLSCAASGFTVSSNDMSWVRQAPGKGLEWVSLIYSGGSTYYADSVKGRFTISRDNSKNTLYLQMNSLRAEDTAVYYCALSTLIHGTWFSYWGQGTLVTVSSGGGGSGGGGSGGGGSDIVLTQSPDSLAVSLGERATINCRASQSVSSSTYSYIHWYQQKPGQPPKLLITYASNLESGVPDRFSGSGSGTDFTLTISSVQEEDAAVYYCQHSWEIPFTFGQGTKLEIKSGGGGSEVQLVESGGGLVQPGGSLKLSCAASGFTFNKYAMNWVRQAPGKGLEWVARIRSKYNNYATYYADSVKDRFTISRDDSKNTAYLQMNNLKTEDTAVYYCVRHGNFGNSYISYWAYWGQGTLVTVSSGGGGSGGGGSGGGGSQTVVTQEPSLTVSPGGTVTLTCGSSTGAVTSGNYPNWVQQKPGQAPRGLIGGTKFLAPGTPARFSGSLLGGKAALTLSGVQPEDEAEYYCVLWYSNRWVFGGGTKLTVL

SEQ ID NO: 882 - DNA, 1500 bp, Artificial
  unknown organism
gaggtgcagctggtcgagtctgggggaggcttgatccagcctggggggtccctgagactctcctgtgcagcctctgggttcaccgtcagtagcaacgacatgagctgggtccgccaggctccagggaaggggctggagtgggtctcacttatttatagcggtggtagcacatactacgcagactccgtgaagggccgattcaccatctccagagacaattccaagaacacgctgtatctgcaaatgaacagcctgagagctgaggacacggccgtgtattactgtgcgctatctactcttattcacgggacctggttttcttattggggccaagggactctggtcaccgtctcctcaggtggtggtggttctggcggcggcggctccggtggtggtggttctgacatcgtgctgacacagtctcctgattccttagctgtgtctctgggggagagggccaccatcaactgcagggccagccaaagtgtcagttcatctacttatagttatatacactggtaccaacagaaaccaggacagccacccaaactcctcatcacttatgcatccaacctagaatctggggtccctgataggttcagtggcagtgggtctgggacagacttcaccctcactatctcttctgtgcaggaggaagatgctgcagtatattactgtcagcacagttgggagattccatttacgttcggccaggggacaaagttggaaataaaatccggaggtggtggatccgaggtgcagctggtcgagtctggaggaggattggtgcagcctggagggtcattgaaactctcatgtgcagcctctggattcaccttcaataagtacgccatgaactgggtccgccaggctccaggaaagggtttggaatgggttgctcgcataagaagtaaatataataattatgcaacatattatgccgattcagtgaaagacaggttcaccatctccagagatgattcaaaaaacactgcctatctacaaatgaacaacttgaaaactgaggacactgccgtgtactactgtgtgagacatgggaacttcggtaatagctacatatcctactgggcttactggggccaagggactctggtcaccgtctcctcaggtggtggtggttctggcggcggcggctccggtggtggtggttctcagactgttgtgactcaggaaccttcactcaccgtatcacctggtggaacagtcacactcacttgtggctcctcgactggggctgttacatctggcaactacccaaactgggtccaacaaaaaccaggtcaggcaccccgtggtctaataggtgggactaagttcctcgcccccggtactcctgccagattctcaggctccctgcttggaggcaaggctgccctcaccctctcaggggtacagccagaggatgaggcagaatattactgtgttctatggtacagcaaccgctgggtgttcggtggaggaaccaaactgactgtccta

SEQ ID NO: 883 - protein, 119 aa, Artificial
  unknown organism
EVQLVESGGGLIQPGGSLRLSCVVSGFTFSNSDMSWVRQAPGKGLEWVSVIYSGGSTYYADSVKGRFTISRDNSKNTLYLQMNSLRAEDTAVYYCALSTLIHGTWFSYWGQGTLVTVSS

SEQ ID NO: 884 - protein, 5 aa, Artificial
  unknown organism
NSDMS

SEQ ID NO: 885 - protein, 16 aa, Artificial
  unknown organism
VIYSGGSTYYADSVKG

SEQ ID NO: 886 - protein, 11 aa, Artificial
  unknown organism
STLIHGTWFSY

SEQ ID NO: 887 - DNA, 357 bp, Artificial
  unknown organism
gaggtgcagctggtcgagtctggaggaggcttgatccagcctggggggtccctgagactctcctgtgtagtctctggattcaccttcagtaacagtgacatgagctgggtccgccaggctccagggaaggggctggagtgggtctcagttatttatagcggtggtagcacatactacgcagactccgtgaagggccgattcaccatctccagagacaattccaagaacacgctgtatcttcaaatgaacagcctgagagccgaggacacggccgtgtattactgtgcgctatctactcttattcacgggacctggttttcttattggggccaagggactctggtcaccgtctcctca

SEQ ID NO: 888 - protein, 111 aa, Artificial
  unknown organism
DIVLTQSPDSLAVSLGERATINCRASQSVSSSTYSYIHWYQQKPGQPPKLLITYASNLESGVPDRFSGSGSGTDFTLTISSVQAEDVAVYYCQHSWEIPFTFGQGTKLEIK

SEQ ID NO: 889 - protein, 15 aa, Artificial
  unknown organism
RASQSVSSSTYSYIH

SEQ ID NO: 890 - protein, 7 aa, Artificial
  unknown organism
YASNLES

SEQ ID NO: 891 - protein, 9 aa, Artificial
  unknown organism
QHSWEIPFT

SEQ ID NO: 892 - DNA, 333 bp, Artificial
  unknown organism
gacatcgtgctgacacagtctcctgattccttagctgtgtctctgggggagagggccaccatcaactgcagggccagccaaagtgtcagttcatctacttatagttatatacactggtaccaacagaaaccaggacagccacccaaactcctcatcacttatgcatccaacctagaatctggggtccctgataggttcagtggcagtgggtctgggacagacttcaccctcactatctcttctgtgcaggcggaagatgttgcagtatattactgtcagcacagttgggagattccatttacgttcggccaggggacaaagttggaaataaaa

SEQ ID NO: 893 - protein, 245 aa, Artificial
  unknown organism
EVQLVESGGGLIQPGGSLRLSCVVSGFTFSNSDMSWVRQAPGKGLEWVSVIYSGGSTYYADSVKGRFTISRDNSKNTLYLQMNSLRAEDTAVYYCALSTLIHGTWFSYWGQGTLVTVSSGGGGSGGGGSGGGGSDIVLTQSPDSLAVSLGERATINCRASQSVSSSTYSYIHWYQQKPGQPPKLLITYASNLESGVPDRFSGSGSGTDFTLTISSVQAEDVAVYYCQHSWEIPFTFGQGTKLEIK

SEQ ID NO: 894 - DNA, 735 bp, Artificial
  unknown organism
gaggtgcagctggtcgagtctggaggaggcttgatccagcctggggggtccctgagactctcctgtgtagtctctggattcaccttcagtaacagtgacatgagctgggtccgccaggctccagggaaggggctggagtgggtctcagttatttatagcggtggtagcacatactacgcagactccgtgaagggccgattcaccatctccagagacaattccaagaacacgctgtatcttcaaatgaacagcctgagagccgaggacacggccgtgtattactgtgcgctatctactcttattcacgggacctggttttcttattggggccaagggactctggtcaccgtctcctcaggtggtggtggttctggcggcggcggctccggtggtggtggttctgacatcgtgctgacacagtctcctgattccttagctgtgtctctgggggagagggccaccatcaactgcagggccagccaaagtgtcagttcatctacttatagttatatacactggtaccaacagaaaccaggacagccacccaaactcctcatcacttatgcatccaacctagaatctggggtccctgataggttcagtggcagtgggtctgggacagacttcaccctcactatctcttctgtgcaggcggaagatgttgcagtatattactgtcagcacagttgggagattccatttacgttcggccaggggacaaagttggaaataaaa

SEQ ID NO: 895 - protein, 500 aa, Artificial
  unknown organism
EVQLVESGGGLIQPGGSLRLSCVVSGFTFSNSDMSWVRQAPGKGLEWVSVIYSGGSTYYADSVKGRFTISRDNSKNTLYLQMNSLRAEDTAVYYCALSTLIHGTWFSYWGQGTLVTVSSGGGGSGGGGSGGGGSDIVLTQSPDSLAVSLGERATINCRASQSVSSSTYSYIHWYQQKPGQPPKLLITYASNLESGVPDRFSGSGSGTDFTLTISSVQAEDVAVYYCQHSWEIPFTFGQGTKLEIKSGGGGSEVQLVESGGGLVQPGGSLKLSCAASGFTFNKYAMNWVRQAPGKGLEWVARIRSKYNNYATYYADSVKDRFTISRDDSKNTAYLQMNNLKTEDTAVYYCVRHGNFGNSYISYWAYWGQGTLVTVSSGGGGSGGGGSGGGGSQTVVTQEPSLTVSPGGTVTLTCGSSTGAVTSGYYPNWVQQKPGQAPRGLIGGTKFLAPGTPARFSGSLLGGKAALTLSGVQPEDEAEYYCALWYSNRWVFGGGTKLTVL

SEQ ID NO: 896 - DNA, 1500 bp, Artificial
  unknown organism
gaggtgcagctggtcgagtctggaggaggcttgatccagcctggggggtccctgagactctcctgtgtagtctctggattcaccttcagtaacagtgacatgagctgggtccgccaggctccagggaaggggctggagtgggtctcagttatttatagcggtggtagcacatactacgcagactccgtgaagggccgattcaccatctccagagacaattccaagaacacgctgtatcttcaaatgaacagcctgagagccgaggacacggccgtgtattactgtgcgctatctactcttattcacgggacctggttttcttattggggccaagggactctggtcaccgtctcctcaggtggtggtggttctggcggcggcggctccggtggtggtggttctgacatcgtgctgacacagtctcctgattccttagctgtgtctctgggggagagggccaccatcaactgcagggccagccaaagtgtcagttcatctacttatagttatatacactggtaccaacagaaaccaggacagccacccaaactcctcatcacttatgcatccaacctagaatctggggtccctgataggttcagtggcagtgggtctgggacagacttcaccctcactatctcttctgtgcaggcggaagatgttgcagtatattactgtcagcacagttgggagattccatttacgttcggccaggggacaaagttggaaataaaatccggaggtggtggatccgaggtgcagctggtcgagtctggaggaggattggtgcagcctggagggtcattgaaactctcatgtgcagcctctggattcaccttcaataagtacgccatgaactgggtccgccaggctccaggaaagggtttggaatgggttgctcgcataagaagtaaatataataattatgcaacatattatgccgattcagtgaaagacaggttcaccatctccagagatgattcaaaaaacactgcctatctacaaatgaacaacttgaaaactgaggacactgccgtgtactactgtgtgagacatgggaacttcggtaatagctacatatcctactgggcttactggggccaagggactctggtcaccgtctcctcaggtggtggtggttctggcggcggcggctccggtggtggtggttctcagactgttgtgactcaggaaccttcactcaccgtatcacctggtggaacagtcacactcacttgtggctcctcgactggggctgttacatctggctactacccaaactgggtccaacaaaaaccaggtcaggcaccccgtggtctaataggtgggactaagttcctcgcccccggtactcctgccagattctcaggctccctgcttggaggcaaggctgccctcaccctctcaggggtacagccagaggatgaggcagaatattactgtgctctatggtacagcaaccgctgggtgttcggtggaggaaccaaactgactgtccta

SEQ ID NO: 897 - protein, 500 aa, Artificial
  unknown organism
EVQLVESGGGLIQPGGSLRLSCVVSGFTFSNSDMSWVRQAPGKGLEWVSVIYSGGSTYYADSVKGRFTISRDNSKNTLYLQMNSLRAEDTAVYYCALSTLIHGTWFSYWGQGTLVTVSSGGGGSGGGGSGGGGSDIVLTQSPDSLAVSLGERATINCRASQSVSSSTYSYIHWYQQKPGQPPKLLITYASNLESGVPDRFSGSGSGTDFTLTISSVQAEDVAVYYCQHSWEIPFTFGQGTKLEIKSGGGGSEVQLVESGGGLVQPGGSLKLSCAASGFTFNSYAMNWVRQAPGKGLEWVARIRSKYNNYATYYADSVKGRFTISRDDSKNTAYLQMNNLKTEDTAVYYCVRHGNFGNSYVSWWAYWGQGTLVTVSSGGGGSGGGGSGGGGSQTVVTQEPSLTVSPGGTVTLTCGSSTGAVTSGNYPNWVQQKPGQAPRGLIGGTKFLAPGTPARFSGSLLGGKAALTLSGVQPEDEAEYYCVLWYSNRWVFGGGTKLTVL

SEQ ID NO: 898 - DNA, 1500 bp, Artificial
  unknown organism
gaggtgcagctggtcgagtctggaggaggcttgatccagcctggggggtccctgagactctcctgtgtagtctctggattcaccttcagtaacagtgacatgagctgggtccgccaggctccagggaaggggctggagtgggtctcagttatttatagcggtggtagcacatactacgcagactccgtgaagggccgattcaccatctccagagacaattccaagaacacgctgtatcttcaaatgaacagcctgagagccgaggacacggccgtgtattactgtgcgctatctactcttattcacgggacctggttttcttattggggccaagggactctggtcaccgtctcctcaggtggtggtggttctggcggcggcggctccggtggtggtggttctgacatcgtgctgacacagtctcctgattccttagctgtgtctctgggggagagggccaccatcaactgcagggccagccaaagtgtcagttcatctacttatagttatatacactggtaccaacagaaaccaggacagccacccaaactcctcatcacttatgcatccaacctagaatctggggtccctgataggttcagtggcagtgggtctgggacagacttcaccctcactatctcttctgtgcaggcggaagatgttgcagtatattactgtcagcacagttgggagattccatttacgttcggccaggggacaaagttggaaataaaatccggaggtggtggatccgaggtgcagctggtcgagtctggaggaggattggtgcagcctggagggtcattgaaactctcatgtgcagcctctggattcaccttcaatagctacgccatgaactgggtccgccaggctccaggaaagggtttggaatgggttgctcgcataagaagtaaatataataattatgcaacatattatgccgattcagtgaaaggcaggttcaccatctccagagatgattcaaaaaacactgcctatctacaaatgaacaacttgaaaactgaggacactgccgtgtactactgtgtgagacatgggaacttcggtaatagctacgtttcctggtgggcttactggggccaagggactctggtcaccgtctcctcaggtggtggtggttctggcggcggcggctccggtggtggtggttctcagactgttgtgactcaggaaccttcactcaccgtatcacctggtggaacagtcacactcacttgtggctcctcgactggggctgttacatctggcaactacccaaactgggtccaacaaaaaccaggtcaggcaccccgtggtctaataggtgggactaagttcctcgcccccggtactcctgccagattctcaggctccctgcttggaggcaaggctgccctcaccctctcaggggtacagccagaggatgaggcagaatattactgtgttctatggtacagcaaccgctgggtgttcggtggaggaaccaaactgactgtccta

SEQ ID NO: 899 - protein, 500 aa, Artificial
  unknown organism
EVQLVESGGGLIQPGGSLRLSCVVSGFTFSNSDMSWVRQAPGKGLEWVSVIYSGGSTYYADSVKGRFTISRDNSKNTLYLQMNSLRAEDTAVYYCALSTLIHGTWFSYWGQGTLVTVSSGGGGSGGGGSGGGGSDIVLTQSPDSLAVSLGERATINCRASQSVSSSTYSYIHWYQQKPGQPPKLLITYASNLESGVPDRFSGSGSGTDFTLTISSVQAEDVAVYYCQHSWEIPFTFGQGTKLEIKSGGGGSEVQLVESGGGLVQPGGSLKLSCAASGFTFNKYAMNWVRQAPGKGLEWVARIRSKYNNYATYYADSVKDRFTISRDDSKNTAYLQMNNLKTEDTAVYYCVRHGNFGNSYISYWAYWGQGTLVTVSSGGGGSGGGGSGGGGSQTVVTQEPSLTVSPGGTVTLTCGSSTGAVTSGNYPNWVQQKPGQAPRGLIGGTKFLAPGTPARFSGSLLGGKAALTLSGVQPEDEAEYYCVLWYSNRWVFGGGTKLTVL

SEQ ID NO: 900 - DNA, 1500 bp, Artificial
  unknown organism
gaggtgcagctggtcgagtctggaggaggcttgatccagcctggggggtccctgagactctcctgtgtagtctctggattcaccttcagtaacagtgacatgagctgggtccgccaggctccagggaaggggctggagtgggtctcagttatttatagcggtggtagcacatactacgcagactccgtgaagggccgattcaccatctccagagacaattccaagaacacgctgtatcttcaaatgaacagcctgagagccgaggacacggccgtgtattactgtgcgctatctactcttattcacgggacctggttttcttattggggccaagggactctggtcaccgtctcctcaggtggtggtggttctggcggcggcggctccggtggtggtggttctgacatcgtgctgacacagtctcctgattccttagctgtgtctctgggggagagggccaccatcaactgcagggccagccaaagtgtcagttcatctacttatagttatatacactggtaccaacagaaaccaggacagccacccaaactcctcatcacttatgcatccaacctagaatctggggtccctgataggttcagtggcagtgggtctgggacagacttcaccctcactatctcttctgtgcaggcggaagatgttgcagtatattactgtcagcacagttgggagattccatttacgttcggccaggggacaaagttggaaataaaatccggaggtggtggatccgaggtgcagctggtcgagtctggaggaggattggtgcagcctggagggtcattgaaactctcatgtgcagcctctggattcaccttcaataagtacgccatgaactgggtccgccaggctccaggaaagggtttggaatgggttgctcgcataagaagtaaatataataattatgcaacatattatgccgattcagtgaaagacaggttcaccatctccagagatgattcaaaaaacactgcctatctacaaatgaacaacttgaaaactgaggacactgccgtgtactactgtgtgagacatgggaacttcggtaatagctacatatcctactgggcttactggggccaagggactctggtcaccgtctcctcaggtggtggtggttctggcggcggcggctccggtggtggtggttctcagactgttgtgactcaggaaccttcactcaccgtatcacctggtggaacagtcacactcacttgtggctcctcgactggggctgttacatctggcaactacccaaactgggtccaacaaaaaccaggtcaggcaccccgtggtctaataggtgggactaagttcctcgcccccggtactcctgccagattctcaggctccctgcttggaggcaaggctgccctcaccctctcaggggtacagccagaggatgaggcagaatattactgtgttctatggtacagcaaccgctgggtgttcggtggaggaaccaaactgactgtccta

SEQ ID NO: 901 - protein, 119 aa, Artificial
  unknown organism
EVQLVESGGGLVQPGGSLRLSCAASGFTVSGSDMSWVRQVPGKGLEWVSIIYSDGSTYYADSVKGRFTISRDNSKNTLYLQMNSLRAEDMAVYYCALSTLIHGTWFSYWGQGTLVTVSS

SEQ ID NO: 902 - protein, 5 aa, Artificial
  unknown organism
GSDMS

SEQ ID NO: 903 - protein, 16 aa, Artificial
  unknown organism
IIYSDGSTYYADSVKG

SEQ ID NO: 904 - protein, 11 aa, Artificial
  unknown organism
STLIHGTWFSY

SEQ ID NO: 905 - DNA, 357 bp, Artificial
  unknown organism
gaggtgcagctggtcgagtctgggggaggcttggtccagcctggggggtccctgagactctcctgcgcagcctctggattcaccgtcagtggcagcgacatgagctgggtccgccaagttccagggaaggggctggagtgggtctcaattatttatagcgatggtagcacatactacgcagactccgtgaaaggccgattcaccatctccagagacaattccaagaacacgctgtatctgcaaatgaacagtctgagagctgaggacatggctgtgtattactgtgccctatctactcttattcacgggacctggttttcttattggggccaagggactctggtcaccgtctcctca

SEQ ID NO: 906 - protein, 111 aa, Artificial
  unknown organism
DIVLTQSPDSLAVSLGERATINCRASQSVSSSTYSYIHWYQQKPGQPPKLLITYASNLESGVPDRFSGSGSGTDFTLTISPVQADDVAVYYCQHSWEIPFTFGQGTKLEIK

SEQ ID NO: 907 - protein, 15 aa, Artificial
  unknown organism
RASQSVSSSTYSYIH

SEQ ID NO: 908 - protein, 7 aa, Artificial
  unknown organism
YASNLES

SEQ ID NO: 909 - protein, 9 aa, Artificial
  unknown organism
QHSWEIPFT

SEQ ID NO: 910 - DNA, 333 bp, Artificial
  unknown organism
gacatcgtgctgacacagtctcctgattccttagctgtgtctctgggggagagggccaccatcaactgcagggccagccaaagtgtcagttcatctacttatagttatatacactggtaccaacagaaaccaggacagccacccaaactcctcatcacttatgcatccaacctagaatctggggtccctgataggttcagtggcagtgggtctgggacagacttcaccctcactatctctcctgtgcaggcggatgatgttgcagtatattactgtcagcacagttgggagattccatttacgttcggccaggggacaaagttggaaataaaa

SEQ ID NO: 911 - protein, 245 aa, Artificial
  unknown organism
EVQLVESGGGLVQPGGSLRLSCAASGFTVSGSDMSWVRQVPGKGLEWVSIIYSDGSTYYADSVKGRFTISRDNSKNTLYLQMNSLRAEDMAVYYCALSTLIHGTWFSYWGQGTLVTVSSGGGGSGGGGSGGGGSDIVLTQSPDSLAVSLGERATINCRASQSVSSSTYSYIHWYQQKPGQPPKLLITYASNLESGVPDRFSGSGSGTDFTLTISPVQADDVAVYYCQHSWEIPFTFGQGTKLEIK

SEQ ID NO: 912 - DNA, 735 bp, Artificial
  unknown organism
gaggtgcagctggtcgagtctgggggaggcttggtccagcctggggggtccctgagactctcctgcgcagcctctggattcaccgtcagtggcagcgacatgagctgggtccgccaagttccagggaaggggctggagtgggtctcaattatttatagcgatggtagcacatactacgcagactccgtgaaaggccgattcaccatctccagagacaattccaagaacacgctgtatctgcaaatgaacagtctgagagctgaggacatggctgtgtattactgtgccctatctactcttattcacgggacctggttttcttattggggccaagggactctggtcaccgtctcctcaggtggtggtggttctggcggcggcggctccggtggtggtggttctgacatcgtgctgacacagtctcctgattccttagctgtgtctctgggggagagggccaccatcaactgcagggccagccaaagtgtcagttcatctacttatagttatatacactggtaccaacagaaaccaggacagccacccaaactcctcatcacttatgcatccaacctagaatctggggtccctgataggttcagtggcagtgggtctgggacagacttcaccctcactatctctcctgtgcaggcggatgatgttgcagtatattactgtcagcacagttgggagattccatttacgttcggccaggggacaaagttggaaataaaa

SEQ ID NO: 913 - protein, 500 aa, Artificial
  unknown organism
EVQLVESGGGLVQPGGSLRLSCAASGFTVSGSDMSWVRQVPGKGLEWVSIIYSDGSTYYADSVKGRFTISRDNSKNTLYLQMNSLRAEDMAVYYCALSTLIHGTWFSYWGQGTLVTVSSGGGGSGGGGSGGGGSDIVLTQSPDSLAVSLGERATINCRASQSVSSSTYSYIHWYQQKPGQPPKLLITYASNLESGVPDRFSGSGSGTDFTLTISPVQADDVAVYYCQHSWEIPFTFGQGTKLEIKSGGGGSEVQLVESGGGLVQPGGSLKLSCAASGFTFNKYAMNWVRQAPGKGLEWVARIRSKYNNYATYYADSVKDRFTISRDDSKNTAYLQMNNLKTEDTAVYYCVRHGNFGNSYISYWAYWGQGTLVTVSSGGGGSGGGGSGGGGSQTVVTQEPSLTVSPGGTVTLTCGSSTGAVTSGYYPNWVQQKPGQAPRGLIGGTKFLAPGTPARFSGSLLGGKAALTLSGVQPEDEAEYYCALWYSNRWVFGGGTKLTVL

SEQ ID NO: 914 - DNA, 1500 bp, Artificial
  unknown organism
gaggtgcagctggtcgagtctgggggaggcttggtccagcctggggggtccctgagactctcctgcgcagcctctggattcaccgtcagtggcagcgacatgagctgggtccgccaagttccagggaaggggctggagtgggtctcaattatttatagcgatggtagcacatactacgcagactccgtgaaaggccgattcaccatctccagagacaattccaagaacacgctgtatctgcaaatgaacagtctgagagctgaggacatggctgtgtattactgtgccctatctactcttattcacgggacctggttttcttattggggccaagggactctggtcaccgtctcctcaggtggtggtggttctggcggcggcggctccggtggtggtggttctgacatcgtgctgacacagtctcctgattccttagctgtgtctctgggggagagggccaccatcaactgcagggccagccaaagtgtcagttcatctacttatagttatatacactggtaccaacagaaaccaggacagccacccaaactcctcatcacttatgcatccaacctagaatctggggtccctgataggttcagtggcagtgggtctgggacagacttcaccctcactatctctcctgtgcaggcggatgatgttgcagtatattactgtcagcacagttgggagattccatttacgttcggccaggggacaaagttggaaataaaatccggaggtggtggatccgaggtgcagctggtcgagtctggaggaggattggtgcagcctggagggtcattgaaactctcatgtgcagcctctggattcaccttcaataagtacgccatgaactgggtccgccaggctccaggaaagggtttggaatgggttgctcgcataagaagtaaatataataattatgcaacatattatgccgattcagtgaaagacaggttcaccatctccagagatgattcaaaaaacactgcctatctacaaatgaacaacttgaaaactgaggacactgccgtgtactactgtgtgagacatgggaacttcggtaatagctacatatcctactgggcttactggggccaagggactctggtcaccgtctcctcaggtggtggtggttctggcggcggcggctccggtggtggtggttctcagactgttgtgactcaggaaccttcactcaccgtatcacctggtggaacagtcacactcacttgtggctcctcgactggggctgttacatctggctactacccaaactgggtccaacaaaaaccaggtcaggcaccccgtggtctaataggtgggactaagttcctcgcccccggtactcctgccagattctcaggctccctgcttggaggcaaggctgccctcaccctctcaggggtacagccagaggatgaggcagaatattactgtgctctatggtacagcaaccgctgggtgttcggtggaggaaccaaactgactgtccta

SEQ ID NO: 915 - protein, 500 aa, Artificial
  unknown organism
EVQLVESGGGLVQPGGSLRLSCAASGFTVSGSDMSWVRQVPGKGLEWVSIIYSDGSTYYADSVKGRFTISRDNSKNTLYLQMNSLRAEDMAVYYCALSTLIHGTWFSYWGQGTLVTVSSGGGGSGGGGSGGGGSDIVLTQSPDSLAVSLGERATINCRASQSVSSSTYSYIHWYQQKPGQPPKLLITYASNLESGVPDRFSGSGSGTDFTLTISPVQADDVAVYYCQHSWEIPFTFGQGTKLEIKSGGGGSEVQLVESGGGLVQPGGSLKLSCAASGFTFNSYAMNWVRQAPGKGLEWVARIRSKYNNYATYYADSVKGRFTISRDDSKNTAYLQMNNLKTEDTAVYYCVRHGNFGNSYVSWWAYWGQGTLVTVSSGGGGSGGGGSGGGGSQTVVTQEPSLTVSPGGTVTLTCGSSTGAVTSGNYPNWVQQKPGQAPRGLIGGTKFLAPGTPARFSGSLLGGKAALTLSGVQPEDEAEYYCVLWYSNRWVFGGGTKLTVL

SEQ ID NO: 916 - DNA, 1500 bp, Artificial
  unknown organism
gaggtgcagctggtcgagtctgggggaggcttggtccagcctggggggtccctgagactctcctgcgcagcctctggattcaccgtcagtggcagcgacatgagctgggtccgccaagttccagggaaggggctggagtgggtctcaattatttatagcgatggtagcacatactacgcagactccgtgaaaggccgattcaccatctccagagacaattccaagaacacgctgtatctgcaaatgaacagtctgagagctgaggacatggctgtgtattactgtgccctatctactcttattcacgggacctggttttcttattggggccaagggactctggtcaccgtctcctcaggtggtggtggttctggcggcggcggctccggtggtggtggttctgacatcgtgctgacacagtctcctgattccttagctgtgtctctgggggagagggccaccatcaactgcagggccagccaaagtgtcagttcatctacttatagttatatacactggtaccaacagaaaccaggacagccacccaaactcctcatcacttatgcatccaacctagaatctggggtccctgataggttcagtggcagtgggtctgggacagacttcaccctcactatctctcctgtgcaggcggatgatgttgcagtatattactgtcagcacagttgggagattccatttacgttcggccaggggacaaagttggaaataaaatccggaggtggtggatccgaggtgcagctggtcgagtctggaggaggattggtgcagcctggagggtcattgaaactctcatgtgcagcctctggattcaccttcaatagctacgccatgaactgggtccgccaggctccaggaaagggtttggaatgggttgctcgcataagaagtaaatataataattatgcaacatattatgccgattcagtgaaaggcaggttcaccatctccagagatgattcaaaaaacactgcctatctacaaatgaacaacttgaaaactgaggacactgccgtgtactactgtgtgagacatgggaacttcggtaatagctacgtttcctggtgggcttactggggccaagggactctggtcaccgtctcctcaggtggtggtggttctggcggcggcggctccggtggtggtggttctcagactgttgtgactcaggaaccttcactcaccgtatcacctggtggaacagtcacactcacttgtggctcctcgactggggctgttacatctggcaactacccaaactgggtccaacaaaaaccaggtcaggcaccccgtggtctaataggtgggactaagttcctcgcccccggtactcctgccagattctcaggctccctgcttggaggcaaggctgccctcaccctctcaggggtacagccagaggatgaggcagaatattactgtgttctatggtacagcaaccgctgggtgttcggtggaggaaccaaactgactgtccta

SEQ ID NO: 917 - protein, 500 aa, Artificial
  unknown organism
EVQLVESGGGLVQPGGSLRLSCAASGFTVSGSDMSWVRQVPGKGLEWVSIIYSDGSTYYADSVKGRFTISRDNSKNTLYLQMNSLRAEDMAVYYCALSTLIHGTWFSYWGQGTLVTVSSGGGGSGGGGSGGGGSDIVLTQSPDSLAVSLGERATINCRASQSVSSSTYSYIHWYQQKPGQPPKLLITYASNLESGVPDRFSGSGSGTDFTLTISPVQADDVAVYYCQHSWEIPFTFGQGTKLEIKSGGGGSEVQLVESGGGLVQPGGSLKLSCAASGFTFNKYAMNWVRQAPGKGLEWVARIRSKYNNYATYYADSVKDRFTISRDDSKNTAYLQMNNLKTEDTAVYYCVRHGNFGNSYISYWAYWGQGTLVTVSSGGGGSGGGGSGGGGSQTVVTQEPSLTVSPGGTVTLTCGSSTGAVTSGNYPNWVQQKPGQAPRGLIGGTKFLAPGTPARFSGSLLGGKAALTLSGVQPEDEAEYYCVLWYSNRWVFGGGTKLTVL

SEQ ID NO: 918 - DNA, 1500 bp, Artificial
  unknown organism
gaggtgcagctggtcgagtctgggggaggcttggtccagcctggggggtccctgagactctcctgcgcagcctctggattcaccgtcagtggcagcgacatgagctgggtccgccaagttccagggaaggggctggagtgggtctcaattatttatagcgatggtagcacatactacgcagactccgtgaaaggccgattcaccatctccagagacaattccaagaacacgctgtatctgcaaatgaacagtctgagagctgaggacatggctgtgtattactgtgccctatctactcttattcacgggacctggttttcttattggggccaagggactctggtcaccgtctcctcaggtggtggtggttctggcggcggcggctccggtggtggtggttctgacatcgtgctgacacagtctcctgattccttagctgtgtctctgggggagagggccaccatcaactgcagggccagccaaagtgtcagttcatctacttatagttatatacactggtaccaacagaaaccaggacagccacccaaactcctcatcacttatgcatccaacctagaatctggggtccctgataggttcagtggcagtgggtctgggacagacttcaccctcactatctctcctgtgcaggcggatgatgttgcagtatattactgtcagcacagttgggagattccatttacgttcggccaggggacaaagttggaaataaaatccggaggtggtggatccgaggtgcagctggtcgagtctggaggaggattggtgcagcctggagggtcattgaaactctcatgtgcagcctctggattcaccttcaataagtacgccatgaactgggtccgccaggctccaggaaagggtttggaatgggttgctcgcataagaagtaaatataataattatgcaacatattatgccgattcagtgaaagacaggttcaccatctccagagatgattcaaaaaacactgcctatctacaaatgaacaacttgaaaactgaggacactgccgtgtactactgtgtgagacatgggaacttcggtaatagctacatatcctactgggcttactggggccaagggactctggtcaccgtctcctcaggtggtggtggttctggcggcggcggctccggtggtggtggttctcagactgttgtgactcaggaaccttcactcaccgtatcacctggtggaacagtcacactcacttgtggctcctcgactggggctgttacatctggcaactacccaaactgggtccaacaaaaaccaggtcaggcaccccgtggtctaataggtgggactaagttcctcgcccccggtactcctgccagattctcaggctccctgcttggaggcaaggctgccctcaccctctcaggggtacagccagaggatgaggcagaatattactgtgttctatggtacagcaaccgctgggtgttcggtggaggaaccaaactgactgtccta

SEQ ID NO: 919 - protein, 119 aa, Artificial; identical to SEQ ID NO: 883
  unknown organism

SEQ ID NO: 920 - protein, 5 aa, Artificial
  unknown organism
NSDMS

SEQ ID NO: 921 - protein, 16 aa, Artificial
  unknown organism
VIYSGGSTYYADSVKG

SEQ ID NO: 922 - protein, 11 aa, Artificial
  unknown organism
STLIHGTWFSY

SEQ ID NO: 923 - DNA, 357 bp, Artificial; identical to SEQ ID NO: 887
  unknown organism

SEQ ID NO: 924 - protein, 111 aa, Artificial
  unknown organism
DIVLTQSPDSLAVSLGERATINCKASQSVSSNNYNYLHWYQQKPGQPPKLLITYASNRESGVPDRFSGSGSGTDFTLTISSLQAEDVAVYYCQHSWEIPFTFGGGTKVDIK

SEQ ID NO: 925 - protein, 15 aa, Artificial
  unknown organism
KASQSVSSNNYNYLH

SEQ ID NO: 926 - protein, 7 aa, Artificial
  unknown organism
YASNRES

SEQ ID NO: 927 - protein, 9 aa, Artificial
  unknown organism
QHSWEIPFT

SEQ ID NO: 928 - DNA, 333 bp, Artificial
  unknown organism
gacatcgtgctgacacagtctcctgattccttagctgtgtctctgggggagagggccaccatcaactgcaaggccagccaaagtgtcagttcaaataattataattatctacactggtaccaacagaaaccaggacagccacccaaactcctcatcacttatgcatccaaccgagaatctggggtccctgataggttcagtggcagtgggtctgggacagacttcaccctcactatctcttctctgcaggcggaagatgttgcagtatattactgtcagcacagttgggagattccatttacgttcggcggggggacaaaggtggacattaaa

SEQ ID NO: 929 - protein, 245 aa, Artificial
  unknown organism
EVQLVESGGGLIQPGGSLRLSCVVSGFTFSNSDMSWVRQAPGKGLEWVSVIYSGGSTYYADSVKGRFTISRDNSKNTLYLQMNSLRAEDTAVYYCALSTLIHGTWFSYWGQGTLVTVSSGGGGSGGGGSGGGGSDIVLTQSPDSLAVSLGERATINCKASQSVSSNNYNYLHWYQQKPGQPPKLLITYASNRESGVPDRFSGSGSGTDFTLTISSLQAEDVAVYYCQHSWEIPFTFGGGTKVDIK

SEQ ID NO: 930 - DNA, 735 bp, Artificial
  unknown organism
gaggtgcagctggtcgagtctggaggaggcttgatccagcctggggggtccctgagactctcctgtgtagtctctggattcaccttcagtaacagtgacatgagctgggtccgccaggctccagggaaggggctggagtgggtctcagttatttatagcggtggtagcacatactacgcagactccgtgaagggccgattcaccatctccagagacaattccaagaacacgctgtatcttcaaatgaacagcctgagagccgaggacacggccgtgtattactgtgcgctatctactcttattcacgggacctggttttcttattggggccaagggactctggtcaccgtctcctcaggtggtggtggttctggcggcggcggctccggtggtggtggttctgacatcgtgctgacacagtctcctgattccttagctgtgtctctgggggagagggccaccatcaactgcaaggccagccaaagtgtcagttcaaataattataattatctacactggtaccaacagaaaccaggacagccacccaaactcctcatcacttatgcatccaaccgagaatctggggtccctgataggttcagtggcagtgggtctgggacagacttcaccctcactatctcttctctgcaggcggaagatgttgcagtatattactgtcagcacagttgggagattccatttacgttcggcggggggacaaaggtggacattaaa

SEQ ID NO: 931 - protein, 500 aa, Artificial
  unknown organism
EVQLVESGGGLIQPGGSLRLSCVVSGFTFSNSDMSWVRQAPGKGLEWVSVIYSGGSTYYADSVKGRFTISRDNSKNTLYLQMNSLRAEDTAVYYCALSTLIHGTWFSYWGQGTLVTVSSGGGGSGGGGSGGGGSDIVLTQSPDSLAVSLGERATINCKASQSVSSNNYNYLHWYQQKPGQPPKLLITYASNRESGVPDRFSGSGSGTDFTLTISSLQAEDVAVYYCQHSWEIPFTFGGGTKVDIKSGGGGSEVQLVESGGGLVQPGGSLKLSCAASGFTFNKYAMNWVRQAPGKGLEWVARIRSKYNNYATYYADSVKDRFTISRDDSKNTAYLQMNNLKTEDTAVYYCVRHGNFGNSYISYWAYWGQGTLVTVSSGGGGSGGGGSGGGGSQTVVTQEPSLTVSPGGTVTLTCGSSTGAVTSGYYPNWVQQKPGQAPRGLIGGTKFLAPGTPARFSGSLLGGKAALTLSGVQPEDEAEYYCALWYSNRWVFGGGTKLTVL

SEQ ID NO: 932 - DNA, 1500 bp, Artificial
  unknown organism
gaggtgcagctggtcgagtctggaggaggcttgatccagcctggggggtccctgagactctcctgtgtagtctctggattcaccttcagtaacagtgacatgagctgggtccgccaggctccagggaaggggctggagtgggtctcagttatttatagcggtggtagcacatactacgcagactccgtgaagggccgattcaccatctccagagacaattccaagaacacgctgtatcttcaaatgaacagcctgagagccgaggacacggccgtgtattactgtgcgctatctactcttattcacgggacctggttttcttattggggccaagggactctggtcaccgtctcctcaggtggtggtggttctggcggcggcggctccggtggtggtggttctgacatcgtgctgacacagtctcctgattccttagctgtgtctctgggggagagggccaccatcaactgcaaggccagccaaagtgtcagttcaaataattataattatctacactggtaccaacagaaaccaggacagccacccaaactcctcatcacttatgcatccaaccgagaatctggggtccctgataggttcagtggcagtgggtctgggacagacttcaccctcactatctcttctctgcaggcggaagatgttgcagtatattactgtcagcacagttgggagattccatttacgttcggcggggggacaaaggtggacattaaatccggaggtggtggatccgaggtgcagctggtcgagtctggaggaggattggtgcagcctggagggtcattgaaactctcatgtgcagcctctggattcaccttcaataagtacgccatgaactgggtccgccaggctccaggaaagggtttggaatgggttgctcgcataagaagtaaatataataattatgcaacatattatgccgattcagtgaaagacaggttcaccatctccagagatgattcaaaaaacactgcctatctacaaatgaacaacttgaaaactgaggacactgccgtgtactactgtgtgagacatgggaacttcggtaatagctacatatcctactgggcttactggggccaagggactctggtcaccgtctcctcaggtggtggtggttctggcggcggcggctccggtggtggtggttctcagactgttgtgactcaggaaccttcactcaccgtatcacctggtggaacagtcacactcacttgtggctcctcgactggggctgttacatctggctactacccaaactgggtccaacaaaaaccaggtcaggcaccccgtggtctaataggtgggactaagttcctcgcccccggtactcctgccagattctcaggctccctgcttggaggcaaggctgccctcaccctctcaggggtacagccagaggatgaggcagaatattactgtgctctatggtacagcaaccgctgggtgttcggtggaggaaccaaactgactgtccta

SEQ ID NO: 933 - protein, 500 aa, Artificial
  unknown organism
EVQLVESGGGLIQPGGSLRLSCVVSGFTFSNSDMSWVRQAPGKGLEWVSVIYSGGSTYYADSVKGRFTISRDNSKNTLYLQMNSLRAEDTAVYYCALSTLIHGTWFSYWGQGTLVTVSSGGGGSGGGGSGGGGSDIVLTQSPDSLAVSLGERATINCKASQSVSSNNYNYLHWYQQKPGQPPKLLITYASNRESGVPDRFSGSGSGTDFTLTISSLQAEDVAVYYCQHSWEIPFTFGGGTKVDIKSGGGGSEVQLVESGGGLVQPGGSLKLSCAASGFTFNSYAMNWVRQAPGKGLEWVARIRSKYNNYATYYADSVKGRFTISRDDSKNTAYLQMNNLKTEDTAVYYCVRHGNFGNSYVSWWAYWGQGTLVTVSSGGGGSGGGGSGGGGSQTVVTQEPSLTVSPGGTVTLTCGSSTGAVTSGNYPNWVQQKPGQAPRGLIGGTKFLAPGTPARFSGSLLGGKAALTLSGVQPEDEAEYYCVLWYSNRWVFGGGTKLTVL

SEQ ID NO: 934 - DNA, 1500 bp, Artificial
  unknown organism
gaggtgcagctggtcgagtctggaggaggcttgatccagcctggggggtccctgagactctcctgtgtagtctctggattcaccttcagtaacagtgacatgagctgggtccgccaggctccagggaaggggctggagtgggtctcagttatttatagcggtggtagcacatactacgcagactccgtgaagggccgattcaccatctccagagacaattccaagaacacgctgtatcttcaaatgaacagcctgagagccgaggacacggccgtgtattactgtgcgctatctactcttattcacgggacctggttttcttattggggccaagggactctggtcaccgtctcctcaggtggtggtggttctggcggcggcggctccggtggtggtggttctgacatcgtgctgacacagtctcctgattccttagctgtgtctctgggggagagggccaccatcaactgcaaggccagccaaagtgtcagttcaaataattataattatctacactggtaccaacagaaaccaggacagccacccaaactcctcatcacttatgcatccaaccgagaatctggggtccctgataggttcagtggcagtgggtctgggacagacttcaccctcactatctcttctctgcaggcggaagatgttgcagtatattactgtcagcacagttgggagattccatttacgttcggcggggggacaaaggtggacattaaatccggaggtggtggatccgaggtgcagctggtcgagtctggaggaggattggtgcagcctggagggtcattgaaactctcatgtgcagcctctggattcaccttcaatagctacgccatgaactgggtccgccaggctccaggaaagggtttggaatgggttgctcgcataagaagtaaatataataattatgcaacatattatgccgattcagtgaaaggcaggttcaccatctccagagatgattcaaaaaacactgcctatctacaaatgaacaacttgaaaactgaggacactgccgtgtactactgtgtgagacatgggaacttcggtaatagctacgtttcctggtgggcttactggggccaagggactctggtcaccgtctcctcaggtggtggtggttctggcggcggcggctccggtggtggtggttctcagactgttgtgactcaggaaccttcactcaccgtatcacctggtggaacagtcacactcacttgtggctcctcgactggggctgttacatctggcaactacccaaactgggtccaacaaaaaccaggtcaggcaccccgtggtctaataggtgggactaagttcctcgcccccggtactcctgccagattctcaggctccctgcttggaggcaaggctgccctcaccctctcaggggtacagccagaggatgaggcagaatattactgtgttctatggtacagcaaccgctgggtgttcggtggaggaaccaaactgactgtccta

SEQ ID NO: 935 - protein, 500 aa, Artificial
  unknown organism
EVQLVESGGGLIQPGGSLRLSCVVSGFTFSNSDMSWVRQAPGKGLEWVSVIYSGGSTYYADSVKGRFTISRDNSKNTLYLQMNSLRAEDTAVYYCALSTLIHGTWFSYWGQGTLVTVSSGGGGSGGGGSGGGGSDIVLTQSPDSLAVSLGERATINCKASQSVSSNNYNYLHWYQQKPGQPPKLLITYASNRESGVPDRFSGSGSGTDFTLTISSLQAEDVAVYYCQHSWEIPFTFGGGTKVDIKSGGGGSEVQLVESGGGLVQPGGSLKLSCAASGFTFNKYAMNWVRQAPGKGLEWVARIRSKYNNYATYYADSVKDRFTISRDDSKNTAYLQMNNLKTEDTAVYYCVRHGNFGNSYISYWAYWGQGTLVTVSSGGGGSGGGGSGGGGSQTVVTQEPSLTVSPGGTVTLTCGSSTGAVTSGNYPNWVQQKPGQAPRGLIGGTKFLAPGTPARFSGSLLGGKAALTLSGVQPEDEAEYYCVLWYSNRWVFGGGTKLTVL

SEQ ID NO: 936 - DNA, 1500 bp, Artificial
  unknown organism
gaggtgcagctggtcgagtctggaggaggcttgatccagcctggggggtccctgagactctcctgtgtagtctctggattcaccttcagtaacagtgacatgagctgggtccgccaggctccagggaaggggctggagtgggtctcagttatttatagcggtggtagcacatactacgcagactccgtgaagggccgattcaccatctccagagacaattccaagaacacgctgtatcttcaaatgaacagcctgagagccgaggacacggccgtgtattactgtgcgctatctactcttattcacgggacctggttttcttattggggccaagggactctggtcaccgtctcctcaggtggtggtggttctggcggcggcggctccggtggtggtggttctgacatcgtgctgacacagtctcctgattccttagctgtgtctctgggggagagggccaccatcaactgcaaggccagccaaagtgtcagttcaaataattataattatctacactggtaccaacagaaaccaggacagccacccaaactcctcatcacttatgcatccaaccgagaatctggggtccctgataggttcagtggcagtgggtctgggacagacttcaccctcactatctcttctctgcaggcggaagatgttgcagtatattactgtcagcacagttgggagattccatttacgttcggcggggggacaaaggtggacattaaatccggaggtggtggatccgaggtgcagctggtcgagtctggaggaggattggtgcagcctggagggtcattgaaactctcatgtgcagcctctggattcaccttcaataagtacgccatgaactgggtccgccaggctccaggaaagggtttggaatgggttgctcgcataagaagtaaatataataattatgcaacatattatgccgattcagtgaaagacaggttcaccatctccagagatgattcaaaaaacactgcctatctacaaatgaacaacttgaaaactgaggacactgccgtgtactactgtgtgagacatgggaacttcggtaatagctacatatcctactgggcttactggggccaagggactctggtcaccgtctcctcaggtggtggtggttctggcggcggcggctccggtggtggtggttctcagactgttgtgactcaggaaccttcactcaccgtatcacctggtggaacagtcacactcacttgtggctcctcgactggggctgttacatctggcaactacccaaactgggtccaacaaaaaccaggtcaggcaccccgtggtctaataggtgggactaagttcctcgcccccggtactcctgccagattctcaggctccctgcttggaggcaaggctgccctcaccctctcaggggtacagccagaggatgaggcagaatattactgtgttctatggtacagcaaccgctgggtgttcggtggaggaaccaaactgactgtccta

SEQ ID NO: 937 - protein, 119 aa, Artificial; identical to SEQ ID NO: 883
  unknown organism

SEQ ID NO: 938 - protein, 5 aa, Artificial
  unknown organism
NSDMS

SEQ ID NO: 939 - protein, 16 aa, Artificial
  unknown organism
VIYSGGSTYYADSVKG

SEQ ID NO: 940 - protein, 11 aa, Artificial
  unknown organism
STLIHGTWFSY

SEQ ID NO: 941 - DNA, 357 bp, Artificial; identical to SEQ ID NO: 887
  unknown organism

SEQ ID NO: 942 - protein, 111 aa, Artificial
  unknown organism
DIVLTQSPDSLAVSLGERATINCKSSQSVSSNNYNYIHWYQQKPGQPPKLLITYASTLESGVPDRFSGSGSGTDFTLTISSLQAEDVAVYYCQHSWEIPFTFGPGTKVDIK

SEQ ID NO: 943 - protein, 15 aa, Artificial
  unknown organism
KSSQSVSSNNYNYIH

SEQ ID NO: 944 - protein, 7 aa, Artificial
  unknown organism
YASTLES

SEQ ID NO: 945 - protein, 9 aa, Artificial
  unknown organism
QHSWEIPFT

SEQ ID NO: 946 - DNA, 333 bp, Artificial
  unknown organism
gacatcgtgctgacacagtctcctgattccttagctgtgtctctgggggagagggccaccatcaactgcaagtccagccaaagtgtcagttcaaataattataattatatacactggtaccaacagaaaccaggacagccacccaaactcctcatcacttatgcatccaccctagaatctggggtccctgataggttcagtggcagtgggtctgggacagacttcaccctcactatctcttctctgcaggcggaagatgttgcagtatattactgtcagcacagttgggagattccatttacgttcggcccggggacaaaggtggacattaaa

SEQ ID NO: 947 - protein, 245 aa, Artificial
  unknown organism
EVQLVESGGGLIQPGGSLRLSCVVSGFTFSNSDMSWVRQAPGKGLEWVSVIYSGGSTYYADSVKGRFTISRDNSKNTLYLQMNSLRAEDTAVYYCALSTLIHGTWFSYWGQGTLVTVSSGGGGSGGGGSGGGGSDIVLTQSPDSLAVSLGERATINCKSSQSVSSNNYNYIHWYQQKPGQPPKLLITYASTLESGVPDRFSGSGSGTDFTLTISSLQAEDVAVYYCQHSWEIPFTFGPGTKVDIK

SEQ ID NO: 948 - DNA, 735 bp, Artificial
  unknown organism
gaggtgcagctggtcgagtctggaggaggcttgatccagcctggggggtccctgagactctcctgtgtagtctctggattcaccttcagtaacagtgacatgagctgggtccgccaggctccagggaaggggctggagtgggtctcagttatttatagcggtggtagcacatactacgcagactccgtgaagggccgattcaccatctccagagacaattccaagaacacgctgtatcttcaaatgaacagcctgagagccgaggacacggccgtgtattactgtgcgctatctactcttattcacgggacctggttttcttattggggccaagggactctggtcaccgtctcctcaggtggtggtggttctggcggcggcggctccggtggtggtggttctgacatcgtgctgacacagtctcctgattccttagctgtgtctctgggggagagggccaccatcaactgcaagtccagccaaagtgtcagttcaaataattataattatatacactggtaccaacagaaaccaggacagccacccaaactcctcatcacttatgcatccaccctagaatctggggtccctgataggttcagtggcagtgggtctgggacagacttcaccctcactatctcttctctgcaggcggaagatgttgcagtatattactgtcagcacagttgggagattccatttacgttcggcccggggacaaaggtggacattaaa

SEQ ID NO: 949 - protein, 500 aa, Artificial
  unknown organism
EVQLVESGGGLIQPGGSLRLSCVVSGFTFSNSDMSWVRQAPGKGLEWVSVIYSGGSTYYADSVKGRFTISRDNSKNTLYLQMNSLRAEDTAVYYCALSTLIHGTWFSYWGQGTLVTVSSGGGGSGGGGSGGGGSDIVLTQSPDSLAVSLGERATINCKSSQSVSSNNYNYIHWYQQKPGQPPKLLITYASTLESGVPDRFSGSGSGTDFTLTISSLQAEDVAVYYCQHSWEIPFTFGPGTKVDIKSGGGGSEVQLVESGGGLVQPGGSLKLSCAASGFTFNKYAMNWVRQAPGKGLEWVARIRSKYNNYATYYADSVKDRFTISRDDSKNTAYLQMNNLKTEDTAVYYCVRHGNFGNSYISYWAYWGQGTLVTVSSGGGGSGGGGSGGGGSQTVVTQEPSLTVSPGGTVTLTCGSSTGAVTSGYYPNWVQQKPGQAPRGLIGGTKFLAPGTPARFSGSLLGGKAALTLSGVQPEDEAEYYCALWYSNRWVFGGGTKLTVL

SEQ ID NO: 950 - DNA, 1500 bp, Artificial
  unknown organism
gaggtgcagctggtcgagtctggaggaggcttgatccagcctggggggtccctgagactctcctgtgtagtctctggattcaccttcagtaacagtgacatgagctgggtccgccaggctccagggaaggggctggagtgggtctcagttatttatagcggtggtagcacatactacgcagactccgtgaagggccgattcaccatctccagagacaattccaagaacacgctgtatcttcaaatgaacagcctgagagccgaggacacggccgtgtattactgtgcgctatctactcttattcacgggacctggttttcttattggggccaagggactctggtcaccgtctcctcaggtggtggtggttctggcggcggcggctccggtggtggtggttctgacatcgtgctgacacagtctcctgattccttagctgtgtctctgggggagagggccaccatcaactgcaagtccagccaaagtgtcagttcaaataattataattatatacactggtaccaacagaaaccaggacagccacccaaactcctcatcacttatgcatccaccctagaatctggggtccctgataggttcagtggcagtgggtctgggacagacttcaccctcactatctcttctctgcaggcggaagatgttgcagtatattactgtcagcacagttgggagattccatttacgttcggcccggggacaaaggtggacattaaatccggaggtggtggatccgaggtgcagctggtcgagtctggaggaggattggtgcagcctggagggtcattgaaactctcatgtgcagcctctggattcaccttcaataagtacgccatgaactgggtccgccaggctccaggaaagggtttggaatgggttgctcgcataagaagtaaatataataattatgcaacatattatgccgattcagtgaaagacaggttcaccatctccagagatgattcaaaaaacactgcctatctacaaatgaacaacttgaaaactgaggacactgccgtgtactactgtgtgagacatgggaacttcggtaatagctacatatcctactgggcttactggggccaagggactctggtcaccgtctcctcaggtggtggtggttctggcggcggcggctccggtggtggtggttctcagactgttgtgactcaggaaccttcactcaccgtatcacctggtggaacagtcacactcacttgtggctcctcgactggggctgttacatctggctactacccaaactgggtccaacaaaaaccaggtcaggcaccccgtggtctaataggtgggactaagttcctcgcccccggtactcctgccagattctcaggctccctgcttggaggcaaggctgccctcaccctctcaggggtacagccagaggatgaggcagaatattactgtgctctatggtacagcaaccgctgggtgttcggtggaggaaccaaactgactgtccta

SEQ ID NO: 951 - protein, 500 aa, Artificial
  unknown organism
EVQLVESGGGLIQPGGSLRLSCVVSGFTFSNSDMSWVRQAPGKGLEWVSVIYSGGSTYYADSVKGRFTISRDNSKNTLYLQMNSLRAEDTAVYYCALSTLIHGTWFSYWGQGTLVTVSSGGGGSGGGGSGGGGSDIVLTQSPDSLAVSLGERATINCKSSQSVSSNNYNYIHWYQQKPGQPPKLLITYASTLESGVPDRFSGSGSGTDFTLTISSLQAEDVAVYYCQHSWEIPFTFGPGTKVDIKSGGGGSEVQLVESGGGLVQPGGSLKLSCAASGFTFNSYAMNWVRQAPGKGLEWVARIRSKYNNYATYYADSVKGRFTISRDDSKNTAYLQMNNLKTEDTAVYYCVRHGNFGNSYVSWWAYWGQGTLVTVSSGGGGSGGGGSGGGGSQTVVTQEPSLTVSPGGTVTLTCGSSTGAVTSGNYPNWVQQKPGQAPRGLIGGTKFLAPGTPARFSGSLLGGKAALTLSGVQPEDEAEYYCVLWYSNRWVFGGGTKLTVL

SEQ ID NO: 952 - DNA, 1500 bp, Artificial
  unknown organism
gaggtgcagctggtcgagtctggaggaggcttgatccagcctggggggtccctgagactctcctgtgtagtctctggattcaccttcagtaacagtgacatgagctgggtccgccaggctccagggaaggggctggagtgggtctcagttatttatagcggtggtagcacatactacgcagactccgtgaagggccgattcaccatctccagagacaattccaagaacacgctgtatcttcaaatgaacagcctgagagccgaggacacggccgtgtattactgtgcgctatctactcttattcacgggacctggttttcttattggggccaagggactctggtcaccgtctcctcaggtggtggtggttctggcggcggcggctccggtggtggtggttctgacatcgtgctgacacagtctcctgattccttagctgtgtctctgggggagagggccaccatcaactgcaagtccagccaaagtgtcagttcaaataattataattatatacactggtaccaacagaaaccaggacagccacccaaactcctcatcacttatgcatccaccctagaatctggggtccctgataggttcagtggcagtgggtctgggacagacttcaccctcactatctcttctctgcaggcggaagatgttgcagtatattactgtcagcacagttgggagattccatttacgttcggcccggggacaaaggtggacattaaatccggaggtggtggatccgaggtgcagctggtcgagtctggaggaggattggtgcagcctggagggtcattgaaactctcatgtgcagcctctggattcaccttcaatagctacgccatgaactgggtccgccaggctccaggaaagggtttggaatgggttgctcgcataagaagtaaatataataattatgcaacatattatgccgattcagtgaaaggcaggttcaccatctccagagatgattcaaaaaacactgcctatctacaaatgaacaacttgaaaactgaggacactgccgtgtactactgtgtgagacatgggaacttcggtaatagctacgtttcctggtgggcttactggggccaagggactctggtcaccgtctcctcaggtggtggtggttctggcggcggcggctccggtggtggtggttctcagactgttgtgactcaggaaccttcactcaccgtatcacctggtggaacagtcacactcacttgtggctcctcgactggggctgttacatctggcaactacccaaactgggtccaacaaaaaccaggtcaggcaccccgtggtctaataggtgggactaagttcctcgcccccggtactcctgccagattctcaggctccctgcttggaggcaaggctgccctcaccctctcaggggtacagccagaggatgaggcagaatattactgtgttctatggtacagcaaccgctgggtgttcggtggaggaaccaaactgactgtccta

SEQ ID NO: 953 - protein, 500 aa, Artificial
  unknown organism
EVQLVESGGGLIQPGGSLRLSCVVSGFTFSNSDMSWVRQAPGKGLEWVSVIYSGGSTYYADSVKGRFTISRDNSKNTLYLQMNSLRAEDTAVYYCALSTLIHGTWFSYWGQGTLVTVSSGGGGSGGGGSGGGGSDIVLTQSPDSLAVSLGERATINCKSSQSVSSNNYNYIHWYQQKPGQPPKLLITYASTLESGVPDRFSGSGSGTDFTLTISSLQAEDVAVYYCQHSWEIPFTFGPGTKVDIKSGGGGSEVQLVESGGGLVQPGGSLKLSCAASGFTFNKYAMNWVRQAPGKGLEWVARIRSKYNNYATYYADSVKDRFTISRDDSKNTAYLQMNNLKTEDTAVYYCVRHGNFGNSYISYWAYWGQGTLVTVSSGGGGSGGGGSGGGGSQTVVTQEPSLTVSPGGTVTLTCGSSTGAVTSGNYPNWVQQKPGQAPRGLIGGTKFLAPGTPARFSGSLLGGKAALTLSGVQPEDEAEYYCVLWYSNRWVFGGGTKLTVL

SEQ ID NO: 954 - DNA, 1500 bp, Artificial
  unknown organism
gaggtgcagctggtcgagtctggaggaggcttgatccagcctggggggtccctgagactctcctgtgtagtctctggattcaccttcagtaacagtgacatgagctgggtccgccaggctccagggaaggggctggagtgggtctcagttatttatagcggtggtagcacatactacgcagactccgtgaagggccgattcaccatctccagagacaattccaagaacacgctgtatcttcaaatgaacagcctgagagccgaggacacggccgtgtattactgtgcgctatctactcttattcacgggacctggttttcttattggggccaagggactctggtcaccgtctcctcaggtggtggtggttctggcggcggcggctccggtggtggtggttctgacatcgtgctgacacagtctcctgattccttagctgtgtctctgggggagagggccaccatcaactgcaagtccagccaaagtgtcagttcaaataattataattatatacactggtaccaacagaaaccaggacagccacccaaactcctcatcacttatgcatccaccctagaatctggggtccctgataggttcagtggcagtgggtctgggacagacttcaccctcactatctcttctctgcaggcggaagatgttgcagtatattactgtcagcacagttgggagattccatttacgttcggcccggggacaaaggtggacattaaatccggaggtggtggatccgaggtgcagctggtcgagtctggaggaggattggtgcagcctggagggtcattgaaactctcatgtgcagcctctggattcaccttcaataagtacgccatgaactgggtccgccaggctccaggaaagggtttggaatgggttgctcgcataagaagtaaatataataattatgcaacatattatgccgattcagtgaaagacaggttcaccatctccagagatgattcaaaaaacactgcctatctacaaatgaacaacttgaaaactgaggacactgccgtgtactactgtgtgagacatgggaacttcggtaatagctacatatcctactgggcttactggggccaagggactctggtcaccgtctcctcaggtggtggtggttctggcggcggcggctccggtggtggtggttctcagactgttgtgactcaggaaccttcactcaccgtatcacctggtggaacagtcacactcacttgtggctcctcgactggggctgttacatctggcaactacccaaactgggtccaacaaaaaccaggtcaggcaccccgtggtctaataggtgggactaagttcctcgcccccggtactcctgccagattctcaggctccctgcttggaggcaaggctgccctcaccctctcaggggtacagccagaggatgaggcagaatattactgtgttctatggtacagcaaccgctgggtgttcggtggaggaaccaaactgactgtccta

SEQ ID NO: 955 - protein, 119 aa, Artificial; identical to SEQ ID NO: 901
  unknown organism

SEQ ID NO: 956 - protein, 5 aa, Artificial
  unknown organism
GSDMS

SEQ ID NO: 957 - protein, 16 aa, Artificial
  unknown organism
IIYSDGSTYYADSVKG

SEQ ID NO: 958 - protein, 11 aa, Artificial
  unknown organism
STLIHGTWFSY

SEQ ID NO: 959 - DNA, 357 bp, Artificial; identical to SEQ ID NO: 905
  unknown organism

SEQ ID NO: 960 - protein, 111 aa, Artificial
  unknown organism
DIVLTQSPDSLAVSLGERATINCKSSQSVSSNNYNYIHWYQQKPGQPPKLLISYASTRESGVPDRFSGSGSGTDFTLTISSLQAEDVAVYYCQHSWEIPFTFGQGTRVDIK

SEQ ID NO: 961 - protein, 15 aa, Artificial
  unknown organism
KSSQSVSSNNYNYIH

SEQ ID NO: 962 - protein, 7 aa, Artificial
  unknown organism
YASTRES

SEQ ID NO: 963 - protein, 9 aa, Artificial
  unknown organism
QHSWEIPFT

SEQ ID NO: 964 - DNA, 333 bp, Artificial
  unknown organism
gacatcgtgctgacacagtctcctgattccttagctgtgtctctgggggagagggccaccatcaactgcaagtccagccaaagtgtcagttcaaataattataattatatacactggtaccaacagaaaccaggacagccacccaaactcctcatctcttatgcatccacccgagaatctggggtccctgataggttcagtggcagtgggtctgggacagacttcaccctcactatctcttctctgcaggcggaagatgttgcagtatattactgtcagcacagttgggagattccatttacgttcggccaggggacaagggtggacattaaa

SEQ ID NO: 965 - protein, 245 aa, Artificial
  unknown organism
EVQLVESGGGLVQPGGSLRLSCAASGFTVSGSDMSWVRQVPGKGLEWVSIIYSDGSTYYADSVKGRFTISRDNSKNTLYLQMNSLRAEDMAVYYCALSTLIHGTWFSYWGQGTLVTVSSGGGGSGGGGSGGGGSDIVLTQSPDSLAVSLGERATINCKSSQSVSSNNYNYIHWYQQKPGQPPKLLISYASTRESGVPDRFSGSGSGTDFTLTISSLQAEDVAVYYCQHSWEIPFTFGQGTRVDIK

SEQ ID NO: 966 - DNA, 735 bp, Artificial
  unknown organism
gaggtgcagctggtcgagtctgggggaggcttggtccagcctggggggtccctgagactctcctgcgcagcctctggattcaccgtcagtggcagcgacatgagctgggtccgccaagttccagggaaggggctggagtgggtctcaattatttatagcgatggtagcacatactacgcagactccgtgaaaggccgattcaccatctccagagacaattccaagaacacgctgtatctgcaaatgaacagtctgagagctgaggacatggctgtgtattactgtgccctatctactcttattcacgggacctggttttcttattggggccaagggactctggtcaccgtctcctcaggtggtggtggttctggcggcggcggctccggtggtggtggttctgacatcgtgctgacacagtctcctgattccttagctgtgtctctgggggagagggccaccatcaactgcaagtccagccaaagtgtcagttcaaataattataattatatacactggtaccaacagaaaccaggacagccacccaaactcctcatctcttatgcatccacccgagaatctggggtccctgataggttcagtggcagtgggtctgggacagacttcaccctcactatctcttctctgcaggcggaagatgttgcagtatattactgtcagcacagttgggagattccatttacgttcggccaggggacaagggtggacattaaa

SEQ ID NO: 967 - protein, 500 aa, Artificial
  unknown organism
EVQLVESGGGLVQPGGSLRLSCAASGFTVSGSDMSWVRQVPGKGLEWVSIIYSDGSTYYADSVKGRFTISRDNSKNTLYLQMNSLRAEDMAVYYCALSTLIHGTWFSYWGQGTLVTVSSGGGGSGGGGSGGGGSDIVLTQSPDSLAVSLGERATINCKSSQSVSSNNYNYIHWYQQKPGQPPKLLISYASTRESGVPDRFSGSGSGTDFTLTISSLQAEDVAVYYCQHSWEIPFTFGQGTRVDIKSGGGGSEVQLVESGGGLVQPGGSLKLSCAASGFTFNKYAMNWVRQAPGKGLEWVARIRSKYNNYATYYADSVKDRFTISRDDSKNTAYLQMNNLKTEDTAVYYCVRHGNFGNSYISYWAYWGQGTLVTVSSGGGGSGGGGSGGGGSQTVVTQEPSLTVSPGGTVTLTCGSSTGAVTSGYYPNWVQQKPGQAPRGLIGGTKFLAPGTPARFSGSLLGGKAALTLSGVQPEDEAEYYCALWYSNRWVFGGGTKLTVL

SEQ ID NO: 968 - DNA, 1500 bp, Artificial
  unknown organism
gaggtgcagctggtcgagtctgggggaggcttggtccagcctggggggtccctgagactctcctgcgcagcctctggattcaccgtcagtggcagcgacatgagctgggtccgccaagttccagggaaggggctggagtgggtctcaattatttatagcgatggtagcacatactacgcagactccgtgaaaggccgattcaccatctccagagacaattccaagaacacgctgtatctgcaaatgaacagtctgagagctgaggacatggctgtgtattactgtgccctatctactcttattcacgggacctggttttcttattggggccaagggactctggtcaccgtctcctcaggtggtggtggttctggcggcggcggctccggtggtggtggttctgacatcgtgctgacacagtctcctgattccttagctgtgtctctgggggagagggccaccatcaactgcaagtccagccaaagtgtcagttcaaataattataattatatacactggtaccaacagaaaccaggacagccacccaaactcctcatctcttatgcatccacccgagaatctggggtccctgataggttcagtggcagtgggtctgggacagacttcaccctcactatctcttctctgcaggcggaagatgttgcagtatattactgtcagcacagttgggagattccatttacgttcggccaggggacaagggtggacattaaatccggaggtggtggatccgaggtgcagctggtcgagtctggaggaggattggtgcagcctggagggtcattgaaactctcatgtgcagcctctggattcaccttcaataagtacgccatgaactgggtccgccaggctccaggaaagggtttggaatgggttgctcgcataagaagtaaatataataattatgcaacatattatgccgattcagtgaaagacaggttcaccatctccagagatgattcaaaaaacactgcctatctacaaatgaacaacttgaaaactgaggacactgccgtgtactactgtgtgagacatgggaacttcggtaatagctacatatcctactgggcttactggggccaagggactctggtcaccgtctcctcaggtggtggtggttctggcggcggcggctccggtggtggtggttctcagactgttgtgactcaggaaccttcactcaccgtatcacctggtggaacagtcacactcacttgtggctcctcgactggggctgttacatctggctactacccaaactgggtccaacaaaaaccaggtcaggcaccccgtggtctaataggtgggactaagttcctcgcccccggtactcctgccagattctcaggctccctgcttggaggcaaggctgccctcaccctctcaggggtacagccagaggatgaggcagaatattactgtgctctatggtacagcaaccgctgggtgttcggtggaggaaccaaactgactgtccta

SEQ ID NO: 969 - protein, 500 aa, Artificial
  unknown organism
EVQLVESGGGLVQPGGSLRLSCAASGFTVSGSDMSWVRQVPGKGLEWVSIIYSDGSTYYADSVKGRFTISRDNSKNTLYLQMNSLRAEDMAVYYCALSTLIHGTWFSYWGQGTLVTVSSGGGGSGGGGSGGGGSDIVLTQSPDSLAVSLGERATINCKSSQSVSSNNYNYIHWYQQKPGQPPKLLISYASTRESGVPDRFSGSGSGTDFTLTISSLQAEDVAVYYCQHSWEIPFTFGQGTRVDIKSGGGGSEVQLVESGGGLVQPGGSLKLSCAASGFTFNSYAMNWVRQAPGKGLEWVARIRSKYNNYATYYADSVKGRFTISRDDSKNTAYLQMNNLKTEDTAVYYCVRHGNFGNSYVSWWAYWGQGTLVTVSSGGGGSGGGGSGGGGSQTVVTQEPSLTVSPGGTVTLTCGSSTGAVTSGNYPNWVQQKPGQAPRGLIGGTKFLAPGTPARFSGSLLGGKAALTLSGVQPEDEAEYYCVLWYSNRWVFGGGTKLTVL

SEQ ID NO: 970 - DNA, 1500 bp, Artificial
  unknown organism
gaggtgcagctggtcgagtctgggggaggcttggtccagcctggggggtccctgagactctcctgcgcagcctctggattcaccgtcagtggcagcgacatgagctgggtccgccaagttccagggaaggggctggagtgggtctcaattatttatagcgatggtagcacatactacgcagactccgtgaaaggccgattcaccatctccagagacaattccaagaacacgctgtatctgcaaatgaacagtctgagagctgaggacatggctgtgtattactgtgccctatctactcttattcacgggacctggttttcttattggggccaagggactctggtcaccgtctcctcaggtggtggtggttctggcggcggcggctccggtggtggtggttctgacatcgtgctgacacagtctcctgattccttagctgtgtctctgggggagagggccaccatcaactgcaagtccagccaaagtgtcagttcaaataattataattatatacactggtaccaacagaaaccaggacagccacccaaactcctcatctcttatgcatccacccgagaatctggggtccctgataggttcagtggcagtgggtctgggacagacttcaccctcactatctcttctctgcaggcggaagatgttgcagtatattactgtcagcacagttgggagattccatttacgttcggccaggggacaagggtggacattaaatccggaggtggtggatccgaggtgcagctggtcgagtctggaggaggattggtgcagcctggagggtcattgaaactctcatgtgcagcctctggattcaccttcaatagctacgccatgaactgggtccgccaggctccaggaaagggtttggaatgggttgctcgcataagaagtaaatataataattatgcaacatattatgccgattcagtgaaaggcaggttcaccatctccagagatgattcaaaaaacactgcctatctacaaatgaacaacttgaaaactgaggacactgccgtgtactactgtgtgagacatgggaacttcggtaatagctacgtttcctggtgggcttactggggccaagggactctggtcaccgtctcctcaggtggtggtggttctggcggcggcggctccggtggtggtggttctcagactgttgtgactcaggaaccttcactcaccgtatcacctggtggaacagtcacactcacttgtggctcctcgactggggctgttacatctggcaactacccaaactgggtccaacaaaaaccaggtcaggcaccccgtggtctaataggtgggactaagttcctcgcccccggtactcctgccagattctcaggctccctgcttggaggcaaggctgccctcaccctctcaggggtacagccagaggatgaggcagaatattactgtgttctatggtacagcaaccgctgggtgttcggtggaggaaccaaactgactgtccta

SEQ ID NO: 971 - protein, 500 aa, Artificial
  unknown organism
EVQLVESGGGLVQPGGSLRLSCAASGFTVSGSDMSWVRQVPGKGLEWVSIIYSDGSTYYADSVKGRFTISRDNSKNTLYLQMNSLRAEDMAVYYCALSTLIHGTWFSYWGQGTLVTVSSGGGGSGGGGSGGGGSDIVLTQSPDSLAVSLGERATINCKSSQSVSSNNYNYIHWYQQKPGQPPKLLISYASTRESGVPDRFSGSGSGTDFTLTISSLQAEDVAVYYCQHSWEIPFTFGQGTRVDIKSGGGGSEVQLVESGGGLVQPGGSLKLSCAASGFTFNKYAMNWVRQAPGKGLEWVARIRSKYNNYATYYADSVKDRFTISRDDSKNTAYLQMNNLKTEDTAVYYCVRHGNFGNSYISYWAYWGQGTLVTVSSGGGGSGGGGSGGGGSQTVVTQEPSLTVSPGGTVTLTCGSSTGAVTSGNYPNWVQQKPGQAPRGLIGGTKFLAPGTPARFSGSLLGGKAALTLSGVQPEDEAEYYCVLWYSNRWVFGGGTKLTVL

SEQ ID NO: 972 - DNA, 1500 bp, Artificial
  unknown organism
gaggtgcagctggtcgagtctgggggaggcttggtccagcctggggggtccctgagactctcctgcgcagcctctggattcaccgtcagtggcagcgacatgagctgggtccgccaagttccagggaaggggctggagtgggtctcaattatttatagcgatggtagcacatactacgcagactccgtgaaaggccgattcaccatctccagagacaattccaagaacacgctgtatctgcaaatgaacagtctgagagctgaggacatggctgtgtattactgtgccctatctactcttattcacgggacctggttttcttattggggccaagggactctggtcaccgtctcctcaggtggtggtggttctggcggcggcggctccggtggtggtggttctgacatcgtgctgacacagtctcctgattccttagctgtgtctctgggggagagggccaccatcaactgcaagtccagccaaagtgtcagttcaaataattataattatatacactggtaccaacagaaaccaggacagccacccaaactcctcatctcttatgcatccacccgagaatctggggtccctgataggttcagtggcagtgggtctgggacagacttcaccctcactatctcttctctgcaggcggaagatgttgcagtatattactgtcagcacagttgggagattccatttacgttcggccaggggacaagggtggacattaaatccggaggtggtggatccgaggtgcagctggtcgagtctggaggaggattggtgcagcctggagggtcattgaaactctcatgtgcagcctctggattcaccttcaataagtacgccatgaactgggtccgccaggctccaggaaagggtttggaatgggttgctcgcataagaagtaaatataataattatgcaacatattatgccgattcagtgaaagacaggttcaccatctccagagatgattcaaaaaacactgcctatctacaaatgaacaacttgaaaactgaggacactgccgtgtactactgtgtgagacatgggaacttcggtaatagctacatatcctactgggcttactggggccaagggactctggtcaccgtctcctcaggtggtggtggttctggcggcggcggctccggtggtggtggttctcagactgttgtgactcaggaaccttcactcaccgtatcacctggtggaacagtcacactcacttgtggctcctcgactggggctgttacatctggcaactacccaaactgggtccaacaaaaaccaggtcaggcaccccgtggtctaataggtgggactaagttcctcgcccccggtactcctgccagattctcaggctccctgcttggaggcaaggctgccctcaccctctcaggggtacagccagaggatgaggcagaatattactgtgttctatggtacagcaaccgctgggtgttcggtggaggaaccaaactgactgtccta

SEQ ID NO: 973 - protein, 119 aa, Artificial; identical to SEQ ID NO: 901
  unknown organism

SEQ ID NO: 974 - protein, 5 aa, Artificial
  unknown organism
GSDMS

SEQ ID NO: 975 - protein, 16 aa, Artificial
  unknown organism
IIYSDGSTYYADSVKG

SEQ ID NO: 976 - protein, 11 aa, Artificial
  unknown organism
STLIHGTWFSY

SEQ ID NO: 977 - DNA, 357 bp, Artificial; identical to SEQ ID NO: 905
  unknown organism

SEQ ID NO: 978 - protein, 111 aa, Artificial
  unknown organism
DIVLTQSPDSLAVSLGERATINCKSSQSVSSNNYNYLHWYQQKPGQPPKLLITYASNRESGVPDRFSGSGSGTDFTLTISSVQAEDVAVYYCQHSWEIPFTFGGGTKVDIK

SEQ ID NO: 979 - protein, 15 aa, Artificial
  unknown organism
KSSQSVSSNNYNYLH

SEQ ID NO: 980 - protein, 7 aa, Artificial
  unknown organism
YASNRES

SEQ ID NO: 981 - protein, 9 aa, Artificial
  unknown organism
QHSWEIPFT

SEQ ID NO: 982 - DNA, 333 bp, Artificial
  unknown organism
gacatcgtgctgacacagtctcctgattccttagctgtgtctctgggggagagggccaccatcaactgcaagtccagccaaagtgtcagttcaaataattataattatctacactggtaccaacagaaaccaggacagccacccaaactcctcatcacttatgcatccaaccgagaatctggggtccctgataggttcagtggcagtgggtctgggacagacttcaccctcactatctcttctgtgcaggcggaagatgttgcagtatattactgtcagcacagttgggagattccatttacgttcggcggggggacaaaggtggacattaaa

SEQ ID NO: 983 - protein, 245 aa, Artificial
  unknown organism
EVQLVESGGGLVQPGGSLRLSCAASGFTVSGSDMSWVRQVPGKGLEWVSIIYSDGSTYYADSVKGRFTISRDNSKNTLYLQMNSLRAEDMAVYYCALSTLIHGTWFSYWGQGTLVTVSSGGGGSGGGGSGGGGSDIVLTQSPDSLAVSLGERATINCKSSQSVSSNNYNYLHWYQQKPGQPPKLLITYASNRESGVPDRFSGSGSGTDFTLTISSVQAEDVAVYYCQHSWEIPFTFGGGTKVDIK

SEQ ID NO: 984 - DNA, 735 bp, Artificial
  unknown organism
gaggtgcagctggtcgagtctgggggaggcttggtccagcctggggggtccctgagactctcctgcgcagcctctggattcaccgtcagtggcagcgacatgagctgggtccgccaagttccagggaaggggctggagtgggtctcaattatttatagcgatggtagcacatactacgcagactccgtgaaaggccgattcaccatctccagagacaattccaagaacacgctgtatctgcaaatgaacagtctgagagctgaggacatggctgtgtattactgtgccctatctactcttattcacgggacctggttttcttattggggccaagggactctggtcaccgtctcctcaggtggtggtggttctggcggcggcggctccggtggtggtggttctgacatcgtgctgacacagtctcctgattccttagctgtgtctctgggggagagggccaccatcaactgcaagtccagccaaagtgtcagttcaaataattataattatctacactggtaccaacagaaaccaggacagccacccaaactcctcatcacttatgcatccaaccgagaatctggggtccctgataggttcagtggcagtgggtctgggacagacttcaccctcactatctcttctgtgcaggcggaagatgttgcagtatattactgtcagcacagttgggagattccatttacgttcggcggggggacaaaggtggacattaaa

SEQ ID NO: 985 - protein, 500 aa, Artificial
  unknown organism
EVQLVESGGGLVQPGGSLRLSCAASGFTVSGSDMSWVRQVPGKGLEWVSIIYSDGSTYYADSVKGRFTISRDNSKNTLYLQMNSLRAEDMAVYYCALSTLIHGTWFSYWGQGTLVTVSSGGGGSGGGGSGGGGSDIVLTQSPDSLAVSLGERATINCKSSQSVSSNNYNYLHWYQQKPGQPPKLLITYASNRESGVPDRFSGSGSGTDFTLTISSVQAEDVAVYYCQHSWEIPFTFGGGTKVDIKSGGGGSEVQLVESGGGLVQPGGSLKLSCAASGFTFNKYAMNWVRQAPGKGLEWVARIRSKYNNYATYYADSVKDRFTISRDDSKNTAYLQMNNLKTEDTAVYYCVRHGNFGNSYISYWAYWGQGTLVTVSSGGGGSGGGGSGGGGSQTVVTQEPSLTVSPGGTVTLTCGSSTGAVTSGYYPNWVQQKPGQAPRGLIGGTKFLAPGTPARFSGSLLGGKAALTLSGVQPEDEAEYYCALWYSNRWVFGGGTKLTVL

SEQ ID NO: 986 - DNA, 1500 bp, Artificial
  unknown organism
gaggtgcagctggtcgagtctgggggaggcttggtccagcctggggggtccctgagactctcctgcgcagcctctggattcaccgtcagtggcagcgacatgagctgggtccgccaagttccagggaaggggctggagtgggtctcaattatttatagcgatggtagcacatactacgcagactccgtgaaaggccgattcaccatctccagagacaattccaagaacacgctgtatctgcaaatgaacagtctgagagctgaggacatggctgtgtattactgtgccctatctactcttattcacgggacctggttttcttattggggccaagggactctggtcaccgtctcctcaggtggtggtggttctggcggcggcggctccggtggtggtggttctgacatcgtgctgacacagtctcctgattccttagctgtgtctctgggggagagggccaccatcaactgcaagtccagccaaagtgtcagttcaaataattataattatctacactggtaccaacagaaaccaggacagccacccaaactcctcatcacttatgcatccaaccgagaatctggggtccctgataggttcagtggcagtgggtctgggacagacttcaccctcactatctcttctgtgcaggcggaagatgttgcagtatattactgtcagcacagttgggagattccatttacgttcggcggggggacaaaggtggacattaaatccggaggtggtggatccgaggtgcagctggtcgagtctggaggaggattggtgcagcctggagggtcattgaaactctcatgtgcagcctctggattcaccttcaataagtacgccatgaactgggtccgccaggctccaggaaagggtttggaatgggttgctcgcataagaagtaaatataataattatgcaacatattatgccgattcagtgaaagacaggttcaccatctccagagatgattcaaaaaacactgcctatctacaaatgaacaacttgaaaactgaggacactgccgtgtactactgtgtgagacatgggaacttcggtaatagctacatatcctactgggcttactggggccaagggactctggtcaccgtctcctcaggtggtggtggttctggcggcggcggctccggtggtggtggttctcagactgttgtgactcaggaaccttcactcaccgtatcacctggtggaacagtcacactcacttgtggctcctcgactggggctgttacatctggctactacccaaactgggtccaacaaaaaccaggtcaggcaccccgtggtctaataggtgggactaagttcctcgcccccggtactcctgccagattctcaggctccctgcttggaggcaaggctgccctcaccctctcaggggtacagccagaggatgaggcagaatattactgtgctctatggtacagcaaccgctgggtgttcggtggaggaaccaaactgactgtccta

SEQ ID NO: 987 - protein, 500 aa, Artificial
  unknown organism
EVQLVESGGGLVQPGGSLRLSCAASGFTVSGSDMSWVRQVPGKGLEWVSIIYSDGSTYYADSVKGRFTISRDNSKNTLYLQMNSLRAEDMAVYYCALSTLIHGTWFSYWGQGTLVTVSSGGGGSGGGGSGGGGSDIVLTQSPDSLAVSLGERATINCKSSQSVSSNNYNYLHWYQQKPGQPPKLLITYASNRESGVPDRFSGSGSGTDFTLTISSVQAEDVAVYYCQHSWEIPFTFGGGTKVDIKSGGGGSEVQLVESGGGLVQPGGSLKLSCAASGFTFNSYAMNWVRQAPGKGLEWVARIRSKYNNYATYYADSVKGRFTISRDDSKNTAYLQMNNLKTEDTAVYYCVRHGNFGNSYVSWWAYWGQGTLVTVSSGGGGSGGGGSGGGGSQTVVTQEPSLTVSPGGTVTLTCGSSTGAVTSGNYPNWVQQKPGQAPRGLIGGTKFLAPGTPARFSGSLLGGKAALTLSGVQPEDEAEYYCVLWYSNRWVFGGGTKLTVL

SEQ ID NO: 988 - DNA, 1500 bp, Artificial
  unknown organism
gaggtgcagctggtcgagtctgggggaggcttggtccagcctggggggtccctgagactctcctgcgcagcctctggattcaccgtcagtggcagcgacatgagctgggtccgccaagttccagggaaggggctggagtgggtctcaattatttatagcgatggtagcacatactacgcagactccgtgaaaggccgattcaccatctccagagacaattccaagaacacgctgtatctgcaaatgaacagtctgagagctgaggacatggctgtgtattactgtgccctatctactcttattcacgggacctggttttcttattggggccaagggactctggtcaccgtctcctcaggtggtggtggttctggcggcggcggctccggtggtggtggttctgacatcgtgctgacacagtctcctgattccttagctgtgtctctgggggagagggccaccatcaactgcaagtccagccaaagtgtcagttcaaataattataattatctacactggtaccaacagaaaccaggacagccacccaaactcctcatcacttatgcatccaaccgagaatctggggtccctgataggttcagtggcagtgggtctgggacagacttcaccctcactatctcttctgtgcaggcggaagatgttgcagtatattactgtcagcacagttgggagattccatttacgttcggcggggggacaaaggtggacattaaatccggaggtggtggatccgaggtgcagctggtcgagtctggaggaggattggtgcagcctggagggtcattgaaactctcatgtgcagcctctggattcaccttcaatagctacgccatgaactgggtccgccaggctccaggaaagggtttggaatgggttgctcgcataagaagtaaatataataattatgcaacatattatgccgattcagtgaaaggcaggttcaccatctccagagatgattcaaaaaacactgcctatctacaaatgaacaacttgaaaactgaggacactgccgtgtactactgtgtgagacatgggaacttcggtaatagctacgtttcctggtgggcttactggggccaagggactctggtcaccgtctcctcaggtggtggtggttctggcggcggcggctccggtggtggtggttctcagactgttgtgactcaggaaccttcactcaccgtatcacctggtggaacagtcacactcacttgtggctcctcgactggggctgttacatctggcaactacccaaactgggtccaacaaaaaccaggtcaggcaccccgtggtctaataggtgggactaagttcctcgcccccggtactcctgccagattctcaggctccctgcttggaggcaaggctgccctcaccctctcaggggtacagccagaggatgaggcagaatattactgtgttctatggtacagcaaccgctgggtgttcggtggaggaaccaaactgactgtccta

SEQ ID NO: 989 - protein, 500 aa, Artificial
  unknown organism
EVQLVESGGGLVQPGGSLRLSCAASGFTVSGSDMSWVRQVPGKGLEWVSIIYSDGSTYYADSVKGRFTISRDNSKNTLYLQMNSLRAEDMAVYYCALSTLIHGTWFSYWGQGTLVTVSSGGGGSGGGGSGGGGSDIVLTQSPDSLAVSLGERATINCKSSQSVSSNNYNYLHWYQQKPGQPPKLLITYASNRESGVPDRFSGSGSGTDFTLTISSVQAEDVAVYYCQHSWEIPFTFGGGTKVDIKSGGGGSEVQLVESGGGLVQPGGSLKLSCAASGFTFNKYAMNWVRQAPGKGLEWVARIRSKYNNYATYYADSVKDRFTISRDDSKNTAYLQMNNLKTEDTAVYYCVRHGNFGNSYISYWAYWGQGTLVTVSSGGGGSGGGGSGGGGSQTVVTQEPSLTVSPGGTVTLTCGSSTGAVTSGNYPNWVQQKPGQAPRGLIGGTKFLAPGTPARFSGSLLGGKAALTLSGVQPEDEAEYYCVLWYSNRWVFGGGTKLTVL

SEQ ID NO: 990 - DNA, 1500 bp, Artificial
  unknown organism
gaggtgcagctggtcgagtctgggggaggcttggtccagcctggggggtccctgagactctcctgcgcagcctctggattcaccgtcagtggcagcgacatgagctgggtccgccaagttccagggaaggggctggagtgggtctcaattatttatagcgatggtagcacatactacgcagactccgtgaaaggccgattcaccatctccagagacaattccaagaacacgctgtatctgcaaatgaacagtctgagagctgaggacatggctgtgtattactgtgccctatctactcttattcacgggacctggttttcttattggggccaagggactctggtcaccgtctcctcaggtggtggtggttctggcggcggcggctccggtggtggtggttctgacatcgtgctgacacagtctcctgattccttagctgtgtctctgggggagagggccaccatcaactgcaagtccagccaaagtgtcagttcaaataattataattatctacactggtaccaacagaaaccaggacagccacccaaactcctcatcacttatgcatccaaccgagaatctggggtccctgataggttcagtggcagtgggtctgggacagacttcaccctcactatctcttctgtgcaggcggaagatgttgcagtatattactgtcagcacagttgggagattccatttacgttcggcggggggacaaaggtggacattaaatccggaggtggtggatccgaggtgcagctggtcgagtctggaggaggattggtgcagcctggagggtcattgaaactctcatgtgcagcctctggattcaccttcaataagtacgccatgaactgggtccgccaggctccaggaaagggtttggaatgggttgctcgcataagaagtaaatataataattatgcaacatattatgccgattcagtgaaagacaggttcaccatctccagagatgattcaaaaaacactgcctatctacaaatgaacaacttgaaaactgaggacactgccgtgtactactgtgtgagacatgggaacttcggtaatagctacatatcctactgggcttactggggccaagggactctggtcaccgtctcctcaggtggtggtggttctggcggcggcggctccggtggtggtggttctcagactgttgtgactcaggaaccttcactcaccgtatcacctggtggaacagtcacactcacttgtggctcctcgactggggctgttacatctggcaactacccaaactgggtccaacaaaaaccaggtcaggcaccccgtggtctaataggtgggactaagttcctcgcccccggtactcctgccagattctcaggctccctgcttggaggcaaggctgccctcaccctctcaggggtacagccagaggatgaggcagaatattactgtgttctatggtacagcaaccgctgggtgttcggtggaggaaccaaactgactgtccta

SEQ ID NO: 991 - protein, 119 aa, Artificial; identical to SEQ ID NO: 865
  unknown organism

SEQ ID NO: 992 - protein, 5 aa, Artificial
  unknown organism
SNDMS

SEQ ID NO: 993 - protein, 16 aa, Artificial
  unknown organism
LIYSGGSTYYADSVKG

SEQ ID NO: 994 - protein, 11 aa, Artificial
  unknown organism
STLIHGTWFSY

SEQ ID NO: 995 - DNA, 357 bp, Artificial; identical to SEQ ID NO: 869
  unknown organism

SEQ ID NO: 996 - protein, 111 aa, Artificial
  unknown organism
DIQMTQSPASLSASVGDRVTITCRASQSISSSTYSYIHWYQQKPGKPPKLLITYASNLESGVPSRFSGSGSGTDFTLNINPLEEEDSATYYCQHSWEIPFTFGQGTKLEIK

SEQ ID NO: 997 - protein, 15 aa, Artificial
  unknown organism
RASQSISSSTYSYIH

SEQ ID NO: 998 - protein, 7 aa, Artificial
  unknown organism
YASNLES

SEQ ID NO: 999 - protein, 9 aa, Artificial
  unknown organism
QHSWEIPFT

SEQ ID NO: 1000 - DNA, 333 bp, Artificial
  unknown organism
gacatccagatgacacagtctcctgcttccttatctgcgtctgtgggggatagggtcaccatcacatgcagggccagccaaagtatcagttcatctacttatagttatatacactggtaccaacagaaaccaggaaagccacccaaactcctcatcacgtatgcatccaacctagaatctggggtcccttccaggttcagtggcagtgggtctgggacagacttcaccctcaacatcaatcctctagaggaggaggattccgcaacatattactgtcagcacagttgggagattccatttacgttcggccaggggacaaagttggaaataaaa

SEQ ID NO: 1001 - protein, 245 aa, Artificial
  unknown organism
EVQLVESGGGLIQPGGSLRLSCAASGFTVSSNDMSWVRQAPGKGLEWVSLIYSGGSTYYADSVKGRFTISRDNSKNTLYLQMNSLRAEDTAVYYCALSTLIHGTWFSYWGQGTLVTVSSGGGGSGGGGSGGGGSDIQMTQSPASLSASVGDRVTITCRASQSISSSTYSYIHWYQQKPGKPPKLLITYASNLESGVPSRFSGSGSGTDFTLNINPLEEEDSATYYCQHSWEIPFTFGQGTKLEIK

SEQ ID NO: 1002 - DNA, 735 bp, Artificial
  unknown organism
gaggtgcagctggtcgagtctgggggaggcttgatccagcctggggggtccctgagactctcctgtgcagcctctgggttcaccgtcagtagcaacgacatgagctgggtccgccaggctccagggaaggggctggagtgggtctcacttatttatagcggtggtagcacatactacgcagactccgtgaagggccgattcaccatctccagagacaattccaagaacacgctgtatctgcaaatgaacagcctgagagctgaggacacggccgtgtattactgtgcgctatctactcttattcacgggacctggttttcttattggggccaagggactctggtcaccgtctcctcaggtggtggtggttctggcggcggcggctccggtggtggtggttctgacatccagatgacacagtctcctgcttccttatctgcgtctgtgggggatagggtcaccatcacatgcagggccagccaaagtatcagttcatctacttatagttatatacactggtaccaacagaaaccaggaaagccacccaaactcctcatcacgtatgcatccaacctagaatctggggtcccttccaggttcagtggcagtgggtctgggacagacttcaccctcaacatcaatcctctagaggaggaggattccgcaacatattactgtcagcacagttgggagattccatttacgttcggccaggggacaaagttggaaataaaa

SEQ ID NO: 1003 - protein, 500 aa, Artificial
  unknown organism
EVQLVESGGGLIQPGGSLRLSCAASGFTVSSNDMSWVRQAPGKGLEWVSLIYSGGSTYYADSVKGRFTISRDNSKNTLYLQMNSLRAEDTAVYYCALSTLIHGTWFSYWGQGTLVTVSSGGGGSGGGGSGGGGSDIQMTQSPASLSASVGDRVTITCRASQSISSSTYSYIHWYQQKPGKPPKLLITYASNLESGVPSRFSGSGSGTDFTLNINPLEEEDSATYYCQHSWEIPFTFGQGTKLEIKSGGGGSEVQLVESGGGLVQPGGSLKLSCAASGFTFNKYAMNWVRQAPGKGLEWVARIRSKYNNYATYYADSVKDRFTISRDDSKNTAYLQMNNLKTEDTAVYYCVRHGNFGNSYISYWAYWGQGTLVTVSSGGGGSGGGGSGGGGSQTVVTQEPSLTVSPGGTVTLTCGSSTGAVTSGNYPNWVQQKPGQAPRGLIGGTKFLAPGTPARFSGSLLGGKAALTLSGVQPEDEAEYYCVLWYSNRWVFGGGTKLTVL

SEQ ID NO: 1004 - DNA, 1500 bp, Artificial
  unknown organism
gaggtgcagctggtcgagtctgggggaggcttgatccagcctggggggtccctgagactctcctgtgcagcctctgggttcaccgtcagtagcaacgacatgagctgggtccgccaggctccagggaaggggctggagtgggtctcacttatttatagcggtggtagcacatactacgcagactccgtgaagggccgattcaccatctccagagacaattccaagaacacgctgtatctgcaaatgaacagcctgagagctgaggacacggccgtgtattactgtgcgctatctactcttattcacgggacctggttttcttattggggccaagggactctggtcaccgtctcctcaggtggtggtggttctggcggcggcggctccggtggtggtggttctgacatccagatgacacagtctcctgcttccttatctgcgtctgtgggggatagggtcaccatcacatgcagggccagccaaagtatcagttcatctacttatagttatatacactggtaccaacagaaaccaggaaagccacccaaactcctcatcacgtatgcatccaacctagaatctggggtcccttccaggttcagtggcagtgggtctgggacagacttcaccctcaacatcaatcctctagaggaggaggattccgcaacatattactgtcagcacagttgggagattccatttacgttcggccaggggacaaagttggaaataaaatccggaggtggtggatccgaggtgcagctggtcgagtctggaggaggattggtgcagcctggagggtcattgaaactctcatgtgcagcctctggattcaccttcaataagtacgccatgaactgggtccgccaggctccaggaaagggtttggaatgggttgctcgcataagaagtaaatataataattatgcaacatattatgccgattcagtgaaagacaggttcaccatctccagagatgattcaaaaaacactgcctatctacaaatgaacaacttgaaaactgaggacactgccgtgtactactgtgtgagacatgggaacttcggtaatagctacatatcctactgggcttactggggccaagggactctggtcaccgtctcctcaggtggtggtggttctggcggcggcggctccggtggtggtggttctcagactgttgtgactcaggaaccttcactcaccgtatcacctggtggaacagtcacactcacttgtggctcctcgactggggctgttacatctggcaactacccaaactgggtccaacaaaaaccaggtcaggcaccccgtggtctaataggtgggactaagttcctcgcccccggtactcctgccagattctcaggctccctgcttggaggcaaggctgccctcaccctctcaggggtacagccagaggatgaggcagaatattactgtgttctatggtacagcaaccgctgggtgttcggtggaggaaccaaactgactgtccta

SEQ ID NO: 1005 - protein, 119 aa, Artificial; identical to SEQ ID NO: 865
  unknown organism

SEQ ID NO: 1006 - protein, 5 aa, Artificial
  unknown organism
SNDMS

SEQ ID NO: 1007 - protein, 16 aa, Artificial
  unknown organism
LIYSGGSTYYADSVKG

SEQ ID NO: 1008 - protein, 11 aa, Artificial
  unknown organism
STLIHGTWFSY

SEQ ID NO: 1009 - DNA, 357 bp, Artificial; identical to SEQ ID NO: 869
  unknown organism

SEQ ID NO: 1010 - protein, 111 aa, Artificial
  unknown organism
DIQMTQSPSSLSASVGDRVTITCRASQSISSSTYSYLHWYQQKPGQAPKLLITYASNLESGVPSRFSGSGSGTDFTLTINSVQPEDFATYYCQHSWEIPFTFGQGTKLEIK

SEQ ID NO: 1011 - protein, 15 aa, Artificial
  unknown organism
RASQSISSSTYSYLH

SEQ ID NO: 1012 - protein, 7 aa, Artificial
  unknown organism
YASNLES

SEQ ID NO: 1013 - protein, 9 aa, Artificial
  unknown organism
QHSWEIPFT

SEQ ID NO: 1014 - DNA, 333 bp, Artificial
  unknown organism
gacatccagatgacacagtctccttcttccttatctgcgtctgtgggggatagggtcaccatcacatgcagggccagccaaagtatcagttcatctacttatagttatctacactggtaccaacagaaaccaggacaggcacccaaactcctcatcacgtatgcatccaacctagaatctggggtcccttccaggttcagtggcagtgggtctgggacagacttcaccctcaccatcaattctgtacagccggaggatttcgcaacatattactgtcagcacagttgggagattccatttacgttcggccaggggacaaagttggaaataaaa

SEQ ID NO: 1015 - protein, 245 aa, Artificial
  unknown organism
EVQLVESGGGLIQPGGSLRLSCAASGFTVSSNDMSWVRQAPGKGLEWVSLIYSGGSTYYADSVKGRFTISRDNSKNTLYLQMNSLRAEDTAVYYCALSTLIHGTWFSYWGQGTLVTVSSGGGGSGGGGSGGGGSDIQMTQSPSSLSASVGDRVTITCRASQSISSSTYSYLHWYQQKPGQAPKLLITYASNLESGVPSRFSGSGSGTDFTLTINSVQPEDFATYYCQHSWEIPFTFGQGTKLEIK

SEQ ID NO: 1016 - DNA, 735 bp, Artificial
  unknown organism
gaggtgcagctggtcgagtctgggggaggcttgatccagcctggggggtccctgagactctcctgtgcagcctctgggttcaccgtcagtagcaacgacatgagctgggtccgccaggctccagggaaggggctggagtgggtctcacttatttatagcggtggtagcacatactacgcagactccgtgaagggccgattcaccatctccagagacaattccaagaacacgctgtatctgcaaatgaacagcctgagagctgaggacacggccgtgtattactgtgcgctatctactcttattcacgggacctggttttcttattggggccaagggactctggtcaccgtctcctcaggtggtggtggttctggcggcggcggctccggtggtggtggttctgacatccagatgacacagtctccttcttccttatctgcgtctgtgggggatagggtcaccatcacatgcagggccagccaaagtatcagttcatctacttatagttatctacactggtaccaacagaaaccaggacaggcacccaaactcctcatcacgtatgcatccaacctagaatctggggtcccttccaggttcagtggcagtgggtctgggacagacttcaccctcaccatcaattctgtacagccggaggatttcgcaacatattactgtcagcacagttgggagattccatttacgttcggccaggggacaaagttggaaataaaa

SEQ ID NO: 1017 - protein, 500 aa, Artificial
  unknown organism
EVQLVESGGGLIQPGGSLRLSCAASGFTVSSNDMSWVRQAPGKGLEWVSLIYSGGSTYYADSVKGRFTISRDNSKNTLYLQMNSLRAEDTAVYYCALSTLIHGTWFSYWGQGTLVTVSSGGGGSGGGGSGGGGSDIQMTQSPSSLSASVGDRVTITCRASQSISSSTYSYLHWYQQKPGQAPKLLITYASNLESGVPSRFSGSGSGTDFTLTINSVQPEDFATYYCQHSWEIPFTFGQGTKLEIKSGGGGSEVQLVESGGGLVQPGGSLKLSCAASGFTFNKYAMNWVRQAPGKGLEWVARIRSKYNNYATYYADSVKDRFTISRDDSKNTAYLQMNNLKTEDTAVYYCVRHGNFGNSYISYWAYWGQGTLVTVSSGGGGSGGGGSGGGGSQTVVTQEPSLTVSPGGTVTLTCGSSTGAVTSGNYPNWVQQKPGQAPRGLIGGTKFLAPGTPARFSGSLLGGKAALTLSGVQPEDEAEYYCVLWYSNRWVFGGGTKLTVL

SEQ ID NO: 1018 - DNA, 1500 bp, Artificial
  unknown organism
gaggtgcagctggtcgagtctgggggaggcttgatccagcctggggggtccctgagactctcctgtgcagcctctgggttcaccgtcagtagcaacgacatgagctgggtccgccaggctccagggaaggggctggagtgggtctcacttatttatagcggtggtagcacatactacgcagactccgtgaagggccgattcaccatctccagagacaattccaagaacacgctgtatctgcaaatgaacagcctgagagctgaggacacggccgtgtattactgtgcgctatctactcttattcacgggacctggttttcttattggggccaagggactctggtcaccgtctcctcaggtggtggtggttctggcggcggcggctccggtggtggtggttctgacatccagatgacacagtctccttcttccttatctgcgtctgtgggggatagggtcaccatcacatgcagggccagccaaagtatcagttcatctacttatagttatctacactggtaccaacagaaaccaggacaggcacccaaactcctcatcacgtatgcatccaacctagaatctggggtcccttccaggttcagtggcagtgggtctgggacagacttcaccctcaccatcaattctgtacagccggaggatttcgcaacatattactgtcagcacagttgggagattccatttacgttcggccaggggacaaagttggaaataaaatccggaggtggtggatccgaggtgcagctggtcgagtctggaggaggattggtgcagcctggagggtcattgaaactctcatgtgcagcctctggattcaccttcaataagtacgccatgaactgggtccgccaggctccaggaaagggtttggaatgggttgctcgcataagaagtaaatataataattatgcaacatattatgccgattcagtgaaagacaggttcaccatctccagagatgattcaaaaaacactgcctatctacaaatgaacaacttgaaaactgaggacactgccgtgtactactgtgtgagacatgggaacttcggtaatagctacatatcctactgggcttactggggccaagggactctggtcaccgtctcctcaggtggtggtggttctggcggcggcggctccggtggtggtggttctcagactgttgtgactcaggaaccttcactcaccgtatcacctggtggaacagtcacactcacttgtggctcctcgactggggctgttacatctggcaactacccaaactgggtccaacaaaaaccaggtcaggcaccccgtggtctaataggtgggactaagttcctcgcccccggtactcctgccagattctcaggctccctgcttggaggcaaggctgccctcaccctctcaggggtacagccagaggatgaggcagaatattactgtgttctatggtacagcaaccgctgggtgttcggtggaggaaccaaactgactgtccta

SEQ ID NO: 1019 - protein, 119 aa, Artificial; identical to SEQ ID NO: 865
  unknown organism

SEQ ID NO: 1020 - protein, 5 aa, Artificial
  unknown organism
SNDMS

SEQ ID NO: 1021 - protein, 16 aa, Artificial
  unknown organism
LIYSGGSTYYADSVKG

SEQ ID NO: 1022 - protein, 11 aa, Artificial
  unknown organism
STLIHGTWFSY

SEQ ID NO: 1023 - DNA, 357 bp, Artificial; identical to SEQ ID NO: 869
  unknown organism

SEQ ID NO: 1024 - protein, 111 aa, Artificial
  unknown organism
DIQMTQSPSSLSVSVGDRVTITCRASQSISSSTYSYLHWYQQKPGKAPKLLITYASNLESGVPSRFSGSGSGTDFTLTINSVQPEDSATYYCQHSWEIPFTFGQGTKLEIK

SEQ ID NO: 1025 - protein, 15 aa, Artificial
  unknown organism
RASQSISSSTYSYLH

SEQ ID NO: 1026 - protein, 7 aa, Artificial
  unknown organism
YASNLES

SEQ ID NO: 1027 - protein, 9 aa, Artificial
  unknown organism
QHSWEIPFT

SEQ ID NO: 1028 - DNA, 333 bp, Artificial
  unknown organism
gacatccagatgacacagtctccttcttccttatctgtgtctgtgggggatagggtcaccatcacatgcagggccagccaaagtatcagttcatctacttatagttatctacactggtaccaacagaaaccaggaaaggcacccaaactcctcatcacgtatgcatccaacctagaatctggggtcccttccaggttcagtggcagtgggtctgggacagacttcaccctcaccatcaattctgtacagccggaggattccgcaacatattactgtcagcacagttgggagattccatttacgttcggccaggggacaaagttggaaataaaa

SEQ ID NO: 1029 - protein, 245 aa, Artificial
  unknown organism
EVQLVESGGGLIQPGGSLRLSCAASGFTVSSNDMSWVRQAPGKGLEWVSLIYSGGSTYYADSVKGRFTISRDNSKNTLYLQMNSLRAEDTAVYYCALSTLIHGTWFSYWGQGTLVTVSSGGGGSGGGGSGGGGSDIQMTQSPSSLSVSVGDRVTITCRASQSISSSTYSYLHWYQQKPGKAPKLLITYASNLESGVPSRFSGSGSGTDFTLTINSVQPEDSATYYCQHSWEIPFTFGQGTKLEIK

SEQ ID NO: 1030 - DNA, 735 bp, Artificial
  unknown organism
gaggtgcagctggtcgagtctgggggaggcttgatccagcctggggggtccctgagactctcctgtgcagcctctgggttcaccgtcagtagcaacgacatgagctgggtccgccaggctccagggaaggggctggagtgggtctcacttatttatagcggtggtagcacatactacgcagactccgtgaagggccgattcaccatctccagagacaattccaagaacacgctgtatctgcaaatgaacagcctgagagctgaggacacggccgtgtattactgtgcgctatctactcttattcacgggacctggttttcttattggggccaagggactctggtcaccgtctcctcaggtggtggtggttctggcggcggcggctccggtggtggtggttctgacatccagatgacacagtctccttcttccttatctgtgtctgtgggggatagggtcaccatcacatgcagggccagccaaagtatcagttcatctacttatagttatctacactggtaccaacagaaaccaggaaaggcacccaaactcctcatcacgtatgcatccaacctagaatctggggtcccttccaggttcagtggcagtgggtctgggacagacttcaccctcaccatcaattctgtacagccggaggattccgcaacatattactgtcagcacagttgggagattccatttacgttcggccaggggacaaagttggaaataaaa

SEQ ID NO: 1031 - protein, 500 aa, Artificial
  unknown organism
EVQLVESGGGLIQPGGSLRLSCAASGFTVSSNDMSWVRQAPGKGLEWVSLIYSGGSTYYADSVKGRFTISRDNSKNTLYLQMNSLRAEDTAVYYCALSTLIHGTWFSYWGQGTLVTVSSGGGGSGGGGSGGGGSDIQMTQSPSSLSVSVGDRVTITCRASQSISSSTYSYLHWYQQKPGKAPKLLITYASNLESGVPSRFSGSGSGTDFTLTINSVQPEDSATYYCQHSWEIPFTFGQGTKLEIKSGGGGSEVQLVESGGGLVQPGGSLKLSCAASGFTFNKYAMNWVRQAPGKGLEWVARIRSKYNNYATYYADSVKDRFTISRDDSKNTAYLQMNNLKTEDTAVYYCVRHGNFGNSYISYWAYWGQGTLVTVSSGGGGSGGGGSGGGGSQTVVTQEPSLTVSPGGTVTLTCGSSTGAVTSGNYPNWVQQKPGQAPRGLIGGTKFLAPGTPARFSGSLLGGKAALTLSGVQPEDEAEYYCVLWYSNRWVFGGGTKLTVL

SEQ ID NO: 1032 - DNA, 1500 bp, Artificial
  unknown organism
gaggtgcagctggtcgagtctgggggaggcttgatccagcctggggggtccctgagactctcctgtgcagcctctgggttcaccgtcagtagcaacgacatgagctgggtccgccaggctccagggaaggggctggagtgggtctcacttatttatagcggtggtagcacatactacgcagactccgtgaagggccgattcaccatctccagagacaattccaagaacacgctgtatctgcaaatgaacagcctgagagctgaggacacggccgtgtattactgtgcgctatctactcttattcacgggacctggttttcttattggggccaagggactctggtcaccgtctcctcaggtggtggtggttctggcggcggcggctccggtggtggtggttctgacatccagatgacacagtctccttcttccttatctgtgtctgtgggggatagggtcaccatcacatgcagggccagccaaagtatcagttcatctacttatagttatctacactggtaccaacagaaaccaggaaaggcacccaaactcctcatcacgtatgcatccaacctagaatctggggtcccttccaggttcagtggcagtgggtctgggacagacttcaccctcaccatcaattctgtacagccggaggattccgcaacatattactgtcagcacagttgggagattccatttacgttcggccaggggacaaagttggaaataaaatccggaggtggtggatccgaggtgcagctggtcgagtctggaggaggattggtgcagcctggagggtcattgaaactctcatgtgcagcctctggattcaccttcaataagtacgccatgaactgggtccgccaggctccaggaaagggtttggaatgggttgctcgcataagaagtaaatataataattatgcaacatattatgccgattcagtgaaagacaggttcaccatctccagagatgattcaaaaaacactgcctatctacaaatgaacaacttgaaaactgaggacactgccgtgtactactgtgtgagacatgggaacttcggtaatagctacatatcctactgggcttactggggccaagggactctggtcaccgtctcctcaggtggtggtggttctggcggcggcggctccggtggtggtggttctcagactgttgtgactcaggaaccttcactcaccgtatcacctggtggaacagtcacactcacttgtggctcctcgactggggctgttacatctggcaactacccaaactgggtccaacaaaaaccaggtcaggcaccccgtggtctaataggtgggactaagttcctcgcccccggtactcctgccagattctcaggctccctgcttggaggcaaggctgccctcaccctctcaggggtacagccagaggatgaggcagaatattactgtgttctatggtacagcaaccgctgggtgttcggtggaggaaccaaactgactgtccta

SEQ ID NO: 1033 - protein, 119 aa, Artificial; identical to SEQ ID NO: 865
  unknown organism

SEQ ID NO: 1034 - protein, 5 aa, Artificial
  unknown organism
SNDMS

SEQ ID NO: 1035 - protein, 16 aa, Artificial
  unknown organism
LIYSGGSTYYADSVKG

SEQ ID NO: 1036 - protein, 11 aa, Artificial
  unknown organism
STLIHGTWFSY

SEQ ID NO: 1037 - DNA, 357 bp, Artificial; identical to SEQ ID NO: 869
  unknown organism

SEQ ID NO: 1038 - protein, 111 aa, Artificial
  unknown organism
DIQMTQSPASLSASVGDRVTITCRASQSISSSTYSYIHWYQQKPGKAPKLLITYASNLESGVPSRFSGSGSGTDFTLTINSLQPEDSATYYCQHSWEIPFTFGQGTKLEIK

SEQ ID NO: 1039 - protein, 15 aa, Artificial
  unknown organism
RASQSISSSTYSYIH

SEQ ID NO: 1040 - protein, 7 aa, Artificial
  unknown organism
YASNLES

SEQ ID NO: 1041 - protein, 9 aa, Artificial
  unknown organism
QHSWEIPFT

SEQ ID NO: 1042 - DNA, 333 bp, Artificial
  unknown organism
gacatccagatgacacagtctcctgcttccttatctgcgtctgtgggggatagggtcaccatcacatgcagggccagccaaagtatcagttcatctacttatagttatatacactggtaccaacagaaaccaggaaaggcacccaaactcctcatcacgtatgcatccaacctagaatctggggtcccttccaggttcagtggcagtgggtctgggacagacttcaccctcaccatcaattctctacagccggaggattccgcaacatattactgtcagcacagttgggagattccatttacgttcggccaggggacaaagttggaaataaaa

SEQ ID NO: 1043 - protein, 245 aa, Artificial
  unknown organism
EVQLVESGGGLIQPGGSLRLSCAASGFTVSSNDMSWVRQAPGKGLEWVSLIYSGGSTYYADSVKGRFTISRDNSKNTLYLQMNSLRAEDTAVYYCALSTLIHGTWFSYWGQGTLVTVSSGGGGSGGGGSGGGGSDIQMTQSPASLSASVGDRVTITCRASQSISSSTYSYIHWYQQKPGKAPKLLITYASNLESGVPSRFSGSGSGTDFTLTINSLQPEDSATYYCQHSWEIPFTFGQGTKLEIK

SEQ ID NO: 1044 - DNA, 735 bp, Artificial
  unknown organism
gaggtgcagctggtcgagtctgggggaggcttgatccagcctggggggtccctgagactctcctgtgcagcctctgggttcaccgtcagtagcaacgacatgagctgggtccgccaggctccagggaaggggctggagtgggtctcacttatttatagcggtggtagcacatactacgcagactccgtgaagggccgattcaccatctccagagacaattccaagaacacgctgtatctgcaaatgaacagcctgagagctgaggacacggccgtgtattactgtgcgctatctactcttattcacgggacctggttttcttattggggccaagggactctggtcaccgtctcctcaggtggtggtggttctggcggcggcggctccggtggtggtggttctgacatccagatgacacagtctcctgcttccttatctgcgtctgtgggggatagggtcaccatcacatgcagggccagccaaagtatcagttcatctacttatagttatatacactggtaccaacagaaaccaggaaaggcacccaaactcctcatcacgtatgcatccaacctagaatctggggtcccttccaggttcagtggcagtgggtctgggacagacttcaccctcaccatcaattctctacagccggaggattccgcaacatattactgtcagcacagttgggagattccatttacgttcggccaggggacaaagttggaaataaaa

SEQ ID NO: 1045 - protein, 500 aa, Artificial
  unknown organism
EVQLVESGGGLIQPGGSLRLSCAASGFTVSSNDMSWVRQAPGKGLEWVSLIYSGGSTYYADSVKGRFTISRDNSKNTLYLQMNSLRAEDTAVYYCALSTLIHGTWFSYWGQGTLVTVSSGGGGSGGGGSGGGGSDIQMTQSPASLSASVGDRVTITCRASQSISSSTYSYIHWYQQKPGKAPKLLITYASNLESGVPSRFSGSGSGTDFTLTINSLQPEDSATYYCQHSWEIPFTFGQGTKLEIKSGGGGSEVQLVESGGGLVQPGGSLKLSCAASGFTFNKYAMNWVRQAPGKGLEWVARIRSKYNNYATYYADSVKDRFTISRDDSKNTAYLQMNNLKTEDTAVYYCVRHGNFGNSYISYWAYWGQGTLVTVSSGGGGSGGGGSGGGGSQTVVTQEPSLTVSPGGTVTLTCGSSTGAVTSGNYPNWVQQKPGQAPRGLIGGTKFLAPGTPARFSGSLLGGKAALTLSGVQPEDEAEYYCVLWYSNRWVFGGGTKLTVL

SEQ ID NO: 1046 - DNA, 1500 bp, Artificial
  unknown organism
gaggtgcagctggtcgagtctgggggaggcttgatccagcctggggggtccctgagactctcctgtgcagcctctgggttcaccgtcagtagcaacgacatgagctgggtccgccaggctccagggaaggggctggagtgggtctcacttatttatagcggtggtagcacatactacgcagactccgtgaagggccgattcaccatctccagagacaattccaagaacacgctgtatctgcaaatgaacagcctgagagctgaggacacggccgtgtattactgtgcgctatctactcttattcacgggacctggttttcttattggggccaagggactctggtcaccgtctcctcaggtggtggtggttctggcggcggcggctccggtggtggtggttctgacatccagatgacacagtctcctgcttccttatctgcgtctgtgggggatagggtcaccatcacatgcagggccagccaaagtatcagttcatctacttatagttatatacactggtaccaacagaaaccaggaaaggcacccaaactcctcatcacgtatgcatccaacctagaatctggggtcccttccaggttcagtggcagtgggtctgggacagacttcaccctcaccatcaattctctacagccggaggattccgcaacatattactgtcagcacagttgggagattccatttacgttcggccaggggacaaagttggaaataaaatccggaggtggtggatccgaggtgcagctggtcgagtctggaggaggattggtgcagcctggagggtcattgaaactctcatgtgcagcctctggattcaccttcaataagtacgccatgaactgggtccgccaggctccaggaaagggtttggaatgggttgctcgcataagaagtaaatataataattatgcaacatattatgccgattcagtgaaagacaggttcaccatctccagagatgattcaaaaaacactgcctatctacaaatgaacaacttgaaaactgaggacactgccgtgtactactgtgtgagacatgggaacttcggtaatagctacatatcctactgggcttactggggccaagggactctggtcaccgtctcctcaggtggtggtggttctggcggcggcggctccggtggtggtggttctcagactgttgtgactcaggaaccttcactcaccgtatcacctggtggaacagtcacactcacttgtggctcctcgactggggctgttacatctggcaactacccaaactgggtccaacaaaaaccaggtcaggcaccccgtggtctaataggtgggactaagttcctcgcccccggtactcctgccagattctcaggctccctgcttggaggcaaggctgccctcaccctctcaggggtacagccagaggatgaggcagaatattactgtgttctatggtacagcaaccgctgggtgttcggtggaggaaccaaactgactgtccta

SEQ ID NO: 1047 - protein, 119 aa, Artificial; identical to SEQ ID NO: 865
  unknown organism

SEQ ID NO: 1048 - protein, 5 aa, Artificial
  unknown organism
SNDMS

SEQ ID NO: 1049 - protein, 16 aa, Artificial
  unknown organism
LIYSGGSTYYADSVKG

SEQ ID NO: 1050 - protein, 11 aa, Artificial
  unknown organism
STLIHGTWFSY

SEQ ID NO: 1051 - DNA, 357 bp, Artificial; identical to SEQ ID NO: 869
  unknown organism

SEQ ID NO: 1052 - protein, 111 aa, Artificial
  unknown organism
DIQMTQSPSSLSASVGDRVTITCRASQSVSSSTYSYLHWYQQKPGKPPKLLITYASNLESGVPSRFSGSGSGTDFTLTINSVQPEDFATYYCQHSWEIPFTFGQGTKLEIK

SEQ ID NO: 1053 - protein, 15 aa, Artificial
  unknown organism
RASQSVSSSTYSYLH

SEQ ID NO: 1054 - protein, 7 aa, Artificial
  unknown organism
YASNLES

SEQ ID NO: 1055 - protein, 9 aa, Artificial
  unknown organism
QHSWEIPFT

SEQ ID NO: 1056 - DNA, 333 bp, Artificial
  unknown organism
gacatccagatgacacagtctccttcttccttatctgcgtctgtgggggatagggtcaccatcacatgcagggccagccaaagtgtcagttcatctacttatagttatctacactggtaccaacagaaaccaggaaagccacccaaactcctcatcacgtatgcatccaacctagaatctggggtcccttccaggttcagtggcagtgggtctgggacagacttcaccctcaccatcaattctgtacagccggaggatttcgcaacatattactgtcagcacagttgggagattccatttacgttcggccaggggacaaagttggaaataaaa

SEQ ID NO: 1057 - protein, 245 aa, Artificial
  unknown organism
EVQLVESGGGLIQPGGSLRLSCAASGFTVSSNDMSWVRQAPGKGLEWVSLIYSGGSTYYADSVKGRFTISRDNSKNTLYLQMNSLRAEDTAVYYCALSTLIHGTWFSYWGQGTLVTVSSGGGGSGGGGSGGGGSDIQMTQSPSSLSASVGDRVTITCRASQSVSSSTYSYLHWYQQKPGKPPKLLITYASNLESGVPSRFSGSGSGTDFTLTINSVQPEDFATYYCQHSWEIPFTFGQGTKLEIK

SEQ ID NO: 1058 - DNA, 735 bp, Artificial
  unknown organism
gaggtgcagctggtcgagtctgggggaggcttgatccagcctggggggtccctgagactctcctgtgcagcctctgggttcaccgtcagtagcaacgacatgagctgggtccgccaggctccagggaaggggctggagtgggtctcacttatttatagcggtggtagcacatactacgcagactccgtgaagggccgattcaccatctccagagacaattccaagaacacgctgtatctgcaaatgaacagcctgagagctgaggacacggccgtgtattactgtgcgctatctactcttattcacgggacctggttttcttattggggccaagggactctggtcaccgtctcctcaggtggtggtggttctggcggcggcggctccggtggtggtggttctgacatccagatgacacagtctccttcttccttatctgcgtctgtgggggatagggtcaccatcacatgcagggccagccaaagtgtcagttcatctacttatagttatctacactggtaccaacagaaaccaggaaagccacccaaactcctcatcacgtatgcatccaacctagaatctggggtcccttccaggttcagtggcagtgggtctgggacagacttcaccctcaccatcaattctgtacagccggaggatttcgcaacatattactgtcagcacagttgggagattccatttacgttcggccaggggacaaagttggaaataaaa

SEQ ID NO: 1059 - protein, 500 aa, Artificial
  unknown organism
EVQLVESGGGLIQPGGSLRLSCAASGFTVSSNDMSWVRQAPGKGLEWVSLIYSGGSTYYADSVKGRFTISRDNSKNTLYLQMNSLRAEDTAVYYCALSTLIHGTWFSYWGQGTLVTVSSGGGGSGGGGSGGGGSDIQMTQSPSSLSASVGDRVTITCRASQSVSSSTYSYLHWYQQKPGKPPKLLITYASNLESGVPSRFSGSGSGTDFTLTINSVQPEDFATYYCQHSWEIPFTFGQGTKLEIKSGGGGSEVQLVESGGGLVQPGGSLKLSCAASGFTFNKYAMNWVRQAPGKGLEWVARIRSKYNNYATYYADSVKDRFTISRDDSKNTAYLQMNNLKTEDTAVYYCVRHGNFGNSYISYWAYWGQGTLVTVSSGGGGSGGGGSGGGGSQTVVTQEPSLTVSPGGTVTLTCGSSTGAVTSGNYPNWVQQKPGQAPRGLIGGTKFLAPGTPARFSGSLLGGKAALTLSGVQPEDEAEYYCVLWYSNRWVFGGGTKLTVL

SEQ ID NO: 1060 - DNA, 1500 bp, Artificial
  unknown organism
gaggtgcagctggtcgagtctgggggaggcttgatccagcctggggggtccctgagactctcctgtgcagcctctgggttcaccgtcagtagcaacgacatgagctgggtccgccaggctccagggaaggggctggagtgggtctcacttatttatagcggtggtagcacatactacgcagactccgtgaagggccgattcaccatctccagagacaattccaagaacacgctgtatctgcaaatgaacagcctgagagctgaggacacggccgtgtattactgtgcgctatctactcttattcacgggacctggttttcttattggggccaagggactctggtcaccgtctcctcaggtggtggtggttctggcggcggcggctccggtggtggtggttctgacatccagatgacacagtctccttcttccttatctgcgtctgtgggggatagggtcaccatcacatgcagggccagccaaagtgtcagttcatctacttatagttatctacactggtaccaacagaaaccaggaaagccacccaaactcctcatcacgtatgcatccaacctagaatctggggtcccttccaggttcagtggcagtgggtctgggacagacttcaccctcaccatcaattctgtacagccggaggatttcgcaacatattactgtcagcacagttgggagattccatttacgttcggccaggggacaaagttggaaataaaatccggaggtggtggatccgaggtgcagctggtcgagtctggaggaggattggtgcagcctggagggtcattgaaactctcatgtgcagcctctggattcaccttcaataagtacgccatgaactgggtccgccaggctccaggaaagggtttggaatgggttgctcgcataagaagtaaatataataattatgcaacatattatgccgattcagtgaaagacaggttcaccatctccagagatgattcaaaaaacactgcctatctacaaatgaacaacttgaaaactgaggacactgccgtgtactactgtgtgagacatgggaacttcggtaatagctacatatcctactgggcttactggggccaagggactctggtcaccgtctcctcaggtggtggtggttctggcggcggcggctccggtggtggtggttctcagactgttgtgactcaggaaccttcactcaccgtatcacctggtggaacagtcacactcacttgtggctcctcgactggggctgttacatctggcaactacccaaactgggtccaacaaaaaccaggtcaggcaccccgtggtctaataggtgggactaagttcctcgcccccggtactcctgccagattctcaggctccctgcttggaggcaaggctgccctcaccctctcaggggtacagccagaggatgaggcagaatattactgtgttctatggtacagcaaccgctgggtgttcggtggaggaaccaaactgactgtccta

SEQ ID NO: 1061 - protein, 119 aa, Artificial; identical to SEQ ID NO: 883
  unknown organism

SEQ ID NO: 1062 - protein, 5 aa, Artificial
  unknown organism
NSDMS

SEQ ID NO: 1063 - protein, 16 aa, Artificial
  unknown organism
VIYSGGSTYYADSVKG

SEQ ID NO: 1064 - protein, 11 aa, Artificial
  unknown organism
STLIHGTWFSY

SEQ ID NO: 1065 - DNA, 357 bp, Artificial; identical to SEQ ID NO: 887
  unknown organism

SEQ ID NO: 1066 - protein, 111 aa, Artificial
  unknown organism
DIQMTQSPASLSVSVGDRATITCRASQSISSSTYSYLHWYQQKPGKAPKLLITYASNLESGVPSRFSGSGSGTDFTLTINPVEPDDFATYYCQHSWEIPFTFGQGTKLEIK

SEQ ID NO: 1067 - protein, 15 aa, Artificial
  unknown organism
RASQSISSSTYSYLH

SEQ ID NO: 1068 - protein, 7 aa, Artificial
  unknown organism
YASNLES

SEQ ID NO: 1069 - protein, 9 aa, Artificial
  unknown organism
QHSWEIPFT

SEQ ID NO: 1070 - DNA, 333 bp, Artificial
  unknown organism
gacatccagatgacacagtctcctgcttccttatctgtgtctgtgggggatagggccaccatcacatgcagggccagccaaagtatcagttcatctacttatagttatctacactggtaccaacagaaaccaggaaaggcacccaaactcctcatcacgtatgcatccaacctagaatctggggtcccttccaggttcagtggcagtgggtctgggacagacttcaccctcaccatcaatcctgtagagccggatgatttcgcaacatattactgtcagcacagttgggagattccatttacgttcggccaggggacaaagttggaaataaaa

SEQ ID NO: 1071 - protein, 245 aa, Artificial
  unknown organism
EVQLVESGGGLIQPGGSLRLSCVVSGFTFSNSDMSWVRQAPGKGLEWVSVIYSGGSTYYADSVKGRFTISRDNSKNTLYLQMNSLRAEDTAVYYCALSTLIHGTWFSYWGQGTLVTVSSGGGGSGGGGSGGGGSDIQMTQSPASLSVSVGDRATITCRASQSISSSTYSYLHWYQQKPGKAPKLLITYASNLESGVPSRFSGSGSGTDFTLTINPVEPDDFATYYCQHSWEIPFTFGQGTKLEIK

SEQ ID NO: 1072 - DNA, 735 bp, Artificial
  unknown organism
gaggtgcagctggtcgagtctggaggaggcttgatccagcctggggggtccctgagactctcctgtgtagtctctggattcaccttcagtaacagtgacatgagctgggtccgccaggctccagggaaggggctggagtgggtctcagttatttatagcggtggtagcacatactacgcagactccgtgaagggccgattcaccatctccagagacaattccaagaacacgctgtatcttcaaatgaacagcctgagagccgaggacacggccgtgtattactgtgcgctatctactcttattcacgggacctggttttcttattggggccaagggactctggtcaccgtctcctcaggtggtggtggttctggcggcggcggctccggtggtggtggttctgacatccagatgacacagtctcctgcttccttatctgtgtctgtgggggatagggccaccatcacatgcagggccagccaaagtatcagttcatctacttatagttatctacactggtaccaacagaaaccaggaaaggcacccaaactcctcatcacgtatgcatccaacctagaatctggggtcccttccaggttcagtggcagtgggtctgggacagacttcaccctcaccatcaatcctgtagagccggatgatttcgcaacatattactgtcagcacagttgggagattccatttacgttcggccaggggacaaagttggaaataaaa

SEQ ID NO: 1073 - protein, 500 aa, Artificial
  unknown organism
EVQLVESGGGLIQPGGSLRLSCVVSGFTFSNSDMSWVRQAPGKGLEWVSVIYSGGSTYYADSVKGRFTISRDNSKNTLYLQMNSLRAEDTAVYYCALSTLIHGTWFSYWGQGTLVTVSSGGGGSGGGGSGGGGSDIQMTQSPASLSVSVGDRATITCRASQSISSSTYSYLHWYQQKPGKAPKLLITYASNLESGVPSRFSGSGSGTDFTLTINPVEPDDFATYYCQHSWEIPFTFGQGTKLEIKSGGGGSEVQLVESGGGLVQPGGSLKLSCAASGFTFNKYAMNWVRQAPGKGLEWVARIRSKYNNYATYYADSVKDRFTISRDDSKNTAYLQMNNLKTEDTAVYYCVRHGNFGNSYISYWAYWGQGTLVTVSSGGGGSGGGGSGGGGSQTVVTQEPSLTVSPGGTVTLTCGSSTGAVTSGNYPNWVQQKPGQAPRGLIGGTKFLAPGTPARFSGSLLGGKAALTLSGVQPEDEAEYYCVLWYSNRWVFGGGTKLTVL

SEQ ID NO: 1074 - DNA, 1500 bp, Artificial
  unknown organism
gaggtgcagctggtcgagtctggaggaggcttgatccagcctggggggtccctgagactctcctgtgtagtctctggattcaccttcagtaacagtgacatgagctgggtccgccaggctccagggaaggggctggagtgggtctcagttatttatagcggtggtagcacatactacgcagactccgtgaagggccgattcaccatctccagagacaattccaagaacacgctgtatcttcaaatgaacagcctgagagccgaggacacggccgtgtattactgtgcgctatctactcttattcacgggacctggttttcttattggggccaagggactctggtcaccgtctcctcaggtggtggtggttctggcggcggcggctccggtggtggtggttctgacatccagatgacacagtctcctgcttccttatctgtgtctgtgggggatagggccaccatcacatgcagggccagccaaagtatcagttcatctacttatagttatctacactggtaccaacagaaaccaggaaaggcacccaaactcctcatcacgtatgcatccaacctagaatctggggtcccttccaggttcagtggcagtgggtctgggacagacttcaccctcaccatcaatcctgtagagccggatgatttcgcaacatattactgtcagcacagttgggagattccatttacgttcggccaggggacaaagttggaaataaaatccggaggtggtggatccgaggtgcagctggtcgagtctggaggaggattggtgcagcctggagggtcattgaaactctcatgtgcagcctctggattcaccttcaataagtacgccatgaactgggtccgccaggctccaggaaagggtttggaatgggttgctcgcataagaagtaaatataataattatgcaacatattatgccgattcagtgaaagacaggttcaccatctccagagatgattcaaaaaacactgcctatctacaaatgaacaacttgaaaactgaggacactgccgtgtactactgtgtgagacatgggaacttcggtaatagctacatatcctactgggcttactggggccaagggactctggtcaccgtctcctcaggtggtggtggttctggcggcggcggctccggtggtggtggttctcagactgttgtgactcaggaaccttcactcaccgtatcacctggtggaacagtcacactcacttgtggctcctcgactggggctgttacatctggcaactacccaaactgggtccaacaaaaaccaggtcaggcaccccgtggtctaataggtgggactaagttcctcgcccccggtactcctgccagattctcaggctccctgcttggaggcaaggctgccctcaccctctcaggggtacagccagaggatgaggcagaatattactgtgttctatggtacagcaaccgctgggtgttcggtggaggaaccaaactgactgtccta

SEQ ID NO: 1075 - protein, 119 aa, Artificial; identical to SEQ ID NO: 883
  unknown organism

SEQ ID NO: 1076 - protein, 5 aa, Artificial
  unknown organism
NSDMS

SEQ ID NO: 1077 - protein, 16 aa, Artificial
  unknown organism
VIYSGGSTYYADSVKG

SEQ ID NO: 1078 - protein, 11 aa, Artificial
  unknown organism
STLIHGTWFSY

SEQ ID NO: 1079 - DNA, 357 bp, Artificial; identical to SEQ ID NO: 887
  unknown organism

SEQ ID NO: 1080 - protein, 111 aa, Artificial
  unknown organism
DIQMTQSPSSLSASVGDRVTITCRASQSISSSTYSYLHWYQQKPGKAPKLLITYASNLESGVPSRFSGSGSGTDFTLTINPVQPEDSATYYCQHSWEIPFTFGQGTKLEIK

SEQ ID NO: 1081 - protein, 15 aa, Artificial
  unknown organism
RASQSISSSTYSYLH

SEQ ID NO: 1082 - protein, 7 aa, Artificial
  unknown organism
YASNLES

SEQ ID NO: 1083 - protein, 9 aa, Artificial
  unknown organism
QHSWEIPFT

SEQ ID NO: 1084 - DNA, 333 bp, Artificial
  unknown organism
gacatccagatgacacagtctccttcttccttatctgcgtctgtgggggatagggtcaccatcacatgcagggccagccaaagtatcagttcatctacttatagttatctacactggtaccaacagaaaccaggaaaggcacccaaactcctcatcacgtatgcatccaacctagaatctggggtcccttccaggttcagtggcagtgggtctgggacagacttcaccctcaccatcaatcctgtacagccggaggattccgcaacatattactgtcagcacagttgggagattccatttacgttcggccaggggacaaagttggaaataaaa

SEQ ID NO: 1085 - protein, 245 aa, Artificial
  unknown organism
EVQLVESGGGLIQPGGSLRLSCVVSGFTFSNSDMSWVRQAPGKGLEWVSVIYSGGSTYYADSVKGRFTISRDNSKNTLYLQMNSLRAEDTAVYYCALSTLIHGTWFSYWGQGTLVTVSSGGGGSGGGGSGGGGSDIQMTQSPSSLSASVGDRVTITCRASQSISSSTYSYLHWYQQKPGKAPKLLITYASNLESGVPSRFSGSGSGTDFTLTINPVQPEDSATYYCQHSWEIPFTFGQGTKLEIK

SEQ ID NO: 1086 - DNA, 735 bp, Artificial
  unknown organism
gaggtgcagctggtcgagtctggaggaggcttgatccagcctggggggtccctgagactctcctgtgtagtctctggattcaccttcagtaacagtgacatgagctgggtccgccaggctccagggaaggggctggagtgggtctcagttatttatagcggtggtagcacatactacgcagactccgtgaagggccgattcaccatctccagagacaattccaagaacacgctgtatcttcaaatgaacagcctgagagccgaggacacggccgtgtattactgtgcgctatctactcttattcacgggacctggttttcttattggggccaagggactctggtcaccgtctcctcaggtggtggtggttctggcggcggcggctccggtggtggtggttctgacatccagatgacacagtctccttcttccttatctgcgtctgtgggggatagggtcaccatcacatgcagggccagccaaagtatcagttcatctacttatagttatctacactggtaccaacagaaaccaggaaaggcacccaaactcctcatcacgtatgcatccaacctagaatctggggtcccttccaggttcagtggcagtgggtctgggacagacttcaccctcaccatcaatcctgtacagccggaggattccgcaacatattactgtcagcacagttgggagattccatttacgttcggccaggggacaaagttggaaataaaa

SEQ ID NO: 1087 - protein, 500 aa, Artificial
  unknown organism
EVQLVESGGGLIQPGGSLRLSCVVSGFTFSNSDMSWVRQAPGKGLEWVSVIYSGGSTYYADSVKGRFTISRDNSKNTLYLQMNSLRAEDTAVYYCALSTLIHGTWFSYWGQGTLVTVSSGGGGSGGGGSGGGGSDIQMTQSPSSLSASVGDRVTITCRASQSISSSTYSYLHWYQQKPGKAPKLLITYASNLESGVPSRFSGSGSGTDFTLTINPVQPEDSATYYCQHSWEIPFTFGQGTKLEIKSGGGGSEVQLVESGGGLVQPGGSLKLSCAASGFTFNKYAMNWVRQAPGKGLEWVARIRSKYNNYATYYADSVKDRFTISRDDSKNTAYLQMNNLKTEDTAVYYCVRHGNFGNSYISYWAYWGQGTLVTVSSGGGGSGGGGSGGGGSQTVVTQEPSLTVSPGGTVTLTCGSSTGAVTSGNYPNWVQQKPGQAPRGLIGGTKFLAPGTPARFSGSLLGGKAALTLSGVQPEDEAEYYCVLWYSNRWVFGGGTKLTVL

SEQ ID NO: 1088 - DNA, 1500 bp, Artificial
  unknown organism
gaggtgcagctggtcgagtctggaggaggcttgatccagcctggggggtccctgagactctcctgtgtagtctctggattcaccttcagtaacagtgacatgagctgggtccgccaggctccagggaaggggctggagtgggtctcagttatttatagcggtggtagcacatactacgcagactccgtgaagggccgattcaccatctccagagacaattccaagaacacgctgtatcttcaaatgaacagcctgagagccgaggacacggccgtgtattactgtgcgctatctactcttattcacgggacctggttttcttattggggccaagggactctggtcaccgtctcctcaggtggtggtggttctggcggcggcggctccggtggtggtggttctgacatccagatgacacagtctccttcttccttatctgcgtctgtgggggatagggtcaccatcacatgcagggccagccaaagtatcagttcatctacttatagttatctacactggtaccaacagaaaccaggaaaggcacccaaactcctcatcacgtatgcatccaacctagaatctggggtcccttccaggttcagtggcagtgggtctgggacagacttcaccctcaccatcaatcctgtacagccggaggattccgcaacatattactgtcagcacagttgggagattccatttacgttcggccaggggacaaagttggaaataaaatccggaggtggtggatccgaggtgcagctggtcgagtctggaggaggattggtgcagcctggagggtcattgaaactctcatgtgcagcctctggattcaccttcaataagtacgccatgaactgggtccgccaggctccaggaaagggtttggaatgggttgctcgcataagaagtaaatataataattatgcaacatattatgccgattcagtgaaagacaggttcaccatctccagagatgattcaaaaaacactgcctatctacaaatgaacaacttgaaaactgaggacactgccgtgtactactgtgtgagacatgggaacttcggtaatagctacatatcctactgggcttactggggccaagggactctggtcaccgtctcctcaggtggtggtggttctggcggcggcggctccggtggtggtggttctcagactgttgtgactcaggaaccttcactcaccgtatcacctggtggaacagtcacactcacttgtggctcctcgactggggctgttacatctggcaactacccaaactgggtccaacaaaaaccaggtcaggcaccccgtggtctaataggtgggactaagttcctcgcccccggtactcctgccagattctcaggctccctgcttggaggcaaggctgccctcaccctctcaggggtacagccagaggatgaggcagaatattactgtgttctatggtacagcaaccgctgggtgttcggtggaggaaccaaactgactgtccta

SEQ ID NO: 1089 - protein, 119 aa, Artificial; identical to SEQ ID NO: 883
  unknown organism

SEQ ID NO: 1090 - protein, 5 aa, Artificial
  unknown organism
NSDMS

SEQ ID NO: 1091 - protein, 16 aa, Artificial
  unknown organism
VIYSGGSTYYADSVKG

SEQ ID NO: 1092 - protein, 11 aa, Artificial
  unknown organism
STLIHGTWFSY

SEQ ID NO: 1093 - DNA, 357 bp, Artificial; identical to SEQ ID NO: 887
  unknown organism

SEQ ID NO: 1094 - protein, 111 aa, Artificial
  unknown organism
DIQMTQSPASLSASVGDRVTITCRASQSISSSTYSYIHWYQQKPGKAPKLLITYASNLESGVPSRFSGSGSGTDFTLTINPLQPEDFATYYCQHSWEIPFTFGQGTKLEIK

SEQ ID NO: 1095 - protein, 15 aa, Artificial
  unknown organism
RASQSISSSTYSYIH

SEQ ID NO: 1096 - protein, 7 aa, Artificial
  unknown organism
YASNLES

SEQ ID NO: 1097 - protein, 9 aa, Artificial
  unknown organism
QHSWEIPFT

SEQ ID NO: 1098 - DNA, 333 bp, Artificial
  unknown organism
gacatccagatgacacagtctcctgcttccttatctgcgtctgtgggggatagggtcaccatcacatgcagggccagccaaagtatcagttcatctacttatagttatatacactggtaccaacagaaaccaggaaaggcacccaaactcctcatcacgtatgcatccaacctagaatctggggtcccttccaggttcagtggcagtgggtctgggacagacttcaccctcaccatcaatcctctacagccggaggatttcgcaacatattactgtcagcacagttgggagattccatttacgttcggccaggggacaaagttggaaataaaa

SEQ ID NO: 1099 - protein, 245 aa, Artificial
  unknown organism
EVQLVESGGGLIQPGGSLRLSCVVSGFTFSNSDMSWVRQAPGKGLEWVSVIYSGGSTYYADSVKGRFTISRDNSKNTLYLQMNSLRAEDTAVYYCALSTLIHGTWFSYWGQGTLVTVSSGGGGSGGGGSGGGGSDIQMTQSPASLSASVGDRVTITCRASQSISSSTYSYIHWYQQKPGKAPKLLITYASNLESGVPSRFSGSGSGTDFTLTINPLQPEDFATYYCQHSWEIPFTFGQGTKLEIK

SEQ ID NO: 1100 - DNA, 735 bp, Artificial
  unknown organism
gaggtgcagctggtcgagtctggaggaggcttgatccagcctggggggtccctgagactctcctgtgtagtctctggattcaccttcagtaacagtgacatgagctgggtccgccaggctccagggaaggggctggagtgggtctcagttatttatagcggtggtagcacatactacgcagactccgtgaagggccgattcaccatctccagagacaattccaagaacacgctgtatcttcaaatgaacagcctgagagccgaggacacggccgtgtattactgtgcgctatctactcttattcacgggacctggttttcttattggggccaagggactctggtcaccgtctcctcaggtggtggtggttctggcggcggcggctccggtggtggtggttctgacatccagatgacacagtctcctgcttccttatctgcgtctgtgggggatagggtcaccatcacatgcagggccagccaaagtatcagttcatctacttatagttatatacactggtaccaacagaaaccaggaaaggcacccaaactcctcatcacgtatgcatccaacctagaatctggggtcccttccaggttcagtggcagtgggtctgggacagacttcaccctcaccatcaatcctctacagccggaggatttcgcaacatattactgtcagcacagttgggagattccatttacgttcggccaggggacaaagttggaaataaaa

SEQ ID NO: 1101 - protein, 500 aa, Artificial
  unknown organism
EVQLVESGGGLIQPGGSLRLSCVVSGFTFSNSDMSWVRQAPGKGLEWVSVIYSGGSTYYADSVKGRFTISRDNSKNTLYLQMNSLRAEDTAVYYCALSTLIHGTWFSYWGQGTLVTVSSGGGGSGGGGSGGGGSDIQMTQSPASLSASVGDRVTITCRASQSISSSTYSYIHWYQQKPGKAPKLLITYASNLESGVPSRFSGSGSGTDFTLTINPLQPEDFATYYCQHSWEIPFTFGQGTKLEIKSGGGGSEVQLVESGGGLVQPGGSLKLSCAASGFTFNKYAMNWVRQAPGKGLEWVARIRSKYNNYATYYADSVKDRFTISRDDSKNTAYLQMNNLKTEDTAVYYCVRHGNFGNSYISYWAYWGQGTLVTVSSGGGGSGGGGSGGGGSQTVVTQEPSLTVSPGGTVTLTCGSSTGAVTSGNYPNWVQQKPGQAPRGLIGGTKFLAPGTPARFSGSLLGGKAALTLSGVQPEDEAEYYCVLWYSNRWVFGGGTKLTVL

SEQ ID NO: 1102 - DNA, 1500 bp, Artificial
  unknown organism
gaggtgcagctggtcgagtctggaggaggcttgatccagcctggggggtccctgagactctcctgtgtagtctctggattcaccttcagtaacagtgacatgagctgggtccgccaggctccagggaaggggctggagtgggtctcagttatttatagcggtggtagcacatactacgcagactccgtgaagggccgattcaccatctccagagacaattccaagaacacgctgtatcttcaaatgaacagcctgagagccgaggacacggccgtgtattactgtgcgctatctactcttattcacgggacctggttttcttattggggccaagggactctggtcaccgtctcctcaggtggtggtggttctggcggcggcggctccggtggtggtggttctgacatccagatgacacagtctcctgcttccttatctgcgtctgtgggggatagggtcaccatcacatgcagggccagccaaagtatcagttcatctacttatagttatatacactggtaccaacagaaaccaggaaaggcacccaaactcctcatcacgtatgcatccaacctagaatctggggtcccttccaggttcagtggcagtgggtctgggacagacttcaccctcaccatcaatcctctacagccggaggatttcgcaacatattactgtcagcacagttgggagattccatttacgttcggccaggggacaaagttggaaataaaatccggaggtggtggatccgaggtgcagctggtcgagtctggaggaggattggtgcagcctggagggtcattgaaactctcatgtgcagcctctggattcaccttcaataagtacgccatgaactgggtccgccaggctccaggaaagggtttggaatgggttgctcgcataagaagtaaatataataattatgcaacatattatgccgattcagtgaaagacaggttcaccatctccagagatgattcaaaaaacactgcctatctacaaatgaacaacttgaaaactgaggacactgccgtgtactactgtgtgagacatgggaacttcggtaatagctacatatcctactgggcttactggggccaagggactctggtcaccgtctcctcaggtggtggtggttctggcggcggcggctccggtggtggtggttctcagactgttgtgactcaggaaccttcactcaccgtatcacctggtggaacagtcacactcacttgtggctcctcgactggggctgttacatctggcaactacccaaactgggtccaacaaaaaccaggtcaggcaccccgtggtctaataggtgggactaagttcctcgcccccggtactcctgccagattctcaggctccctgcttggaggcaaggctgccctcaccctctcaggggtacagccagaggatgaggcagaatattactgtgttctatggtacagcaaccgctgggtgttcggtggaggaaccaaactgactgtccta

SEQ ID NO: 1103 - DNA, 1788 bp, Artificial
  unknown organism
atgcgcgtcctcctcgccgcgctgggactgctgttcctgggggcgctacgagccttcccacaggatcgacccttcgaggacacctgtcatggaaaccccagccactactatgacaaggctgtcaggaggtgctgttaccgctgccccatggggctgttcccgacacagcagtgcccacagaggcctactgactgcaggaagcagtgtgagcctgactactacctggatgaggccgaccgctgcacagcctgcgtgacttgttctcgagatgacctcgtggagaagacgccgtgtgcatggaactcctcccgtgtctgcgaatgtcggcccggcatgttctgttccacgtctgccgtcaactcctgtgcccgctgcttcttccattctgtctgtccggcagggatgattgtcaagttcccaggcacggcgcagaagaacacggtctgtgagccggcttccccaggggtcagccctgcctgtgccagcccagagaactgcaaggaaccctccagtggcaccatcccccaggccaagcccaccccggtgtccccagcaacctccagtgccagcaccatgcctgtaagagggggcacccgcctcgcccaggaagctgcttctaaactgacgagggctcccgactctccctcctctgtgggaaggcctagttcagatccaggtctgtccccaacacagccatgcccagaggggtctggtgattgcagaaagcagtgtgagcccgactactacctggacgaggccggccgctgcacagcctgcgtgagctgttctcgagatgaccttgtggagaagacgccatgtgcatggaactcctcccgcacctgcgaatgtcggcctggcatgatctgtgccacatcagccaccaactcctgtgcccgctgtgtcccctacccaatctgtgcagcagagacggtcaccaagccccaggatatggctgagaaggacaccacctttgaggcgccacccctggggacccagccggactgcaaccccaccccagagaatggcgaggcgcctgccagcaccagccccactcagagcttgctggtggactcccaggccagtaagacgctgcccatcccaaccagcgctcccgtcgctctctcctccacggggaagcccgttctggatgcagggccagtgctcttctgggtgatcctggtgttggttgtggtggtcggctccagcgccttcctcctgtgccaccggagggcctgcaggaagcgaatccggcagaagctccacctgtgctacccggtccagacctcccagcccaagctagagcttgtggattccagacccaggaggagctcaacgcagctgaggagtggtgcgtcggtgacagaacccgtcgcggaagagcgagggttaatgagccagccactgatggagacctgccacagcgtgggggcagcctacctggagagcctgccgctgcaggatgccagcccggccgggggcccctcgtcccccagggaccttcctgagccccgggtgtccacggagcacaccaataacaagattgagaaaatctacatcatgaaggctgacaccgtgatcgtggggaccgtgaaggctgagctgccggagggccggggcctggcggggccagcagagcccgagttggaggaggagctggaggcggaccataccccccactaccccgagcaggagacagaaccgcctctgggcagctgcagcgatgtcatgctctcagtggaagaggaagggaaagaagaccccttgcccacagctgcctctggaaagtga

SEQ ID NO: 1104 - protein, 595 aa, Artificial
  unknown organism
MRVLLAALGLLFLGALRAFPQDRPFEDTCHGNPSHYYDKAVRRCCYRCPMGLFPTQQCPQRPTDCRKQCEPDYYLDEADRCTACVTCSRDDLVEKTPCAWNSSRVCECRPGMFCSTSAVNSCARCFFHSVCPAGMIVKFPGTAQKNTVCEPASPGVSPACASPENCKEPSSGTIPQAKPTPVSPATSSASTMPVRGGTRLAQEAASKLTRAPDSPSSVGRPSSDPGLSPTQPCPEGSGDCRKQCEPDYYLDEAGRCTACVSCSRDDLVEKTPCAWNSSRTCECRPGMICATSATNSCARCVPYPICAAETVTKPQDMAEKDTTFEAPPLGTQPDCNPTPENGEAPASTSPTQSLLVDSQASKTLPIPTSAPVALSSTGKPVLDAGPVLFWVILVLVVVVGSSAFLLCHRRACRKRIRQKLHLCYPVQTSQPKLELVDSRPRRSSTQLRSGASVTEPVAEERGLMSQPLMETCHSVGAAYLESLPLQDASPAGGPSSPRDLPEPRVSTEHTNNKIEKIYIMKADTVIVGTVKAELPEGRGLAGPAEPELEEELEADHTPHYPEQETEPPLGSCSDVMLSVEEEGKEDPLPTAASGK

SEQ ID NO: 1105 - DNA, 1788 bp, Artificial
  unknown organism
atgcgcgtcctcctcgccgcgctgggactgctgttcctgggggcgctccgagccttcccacaggatcgacccttcgaggacacctgtcgtggaaaccccggccactactatgacaaggctgtcaggaggtgctgttaccgctgccccacggggctgttcccgacacagcagtgcccacagaggcctgctgactgcaggaagcagtgtgaacctgactactacctggatgaggccggccgctgtacggcctgcgtgagttgttctcgagacgacctcgtggagaagatgccgtgtgcgtggaactcctcccgtgtctgcgaatgtcagcctggcatgttctgtgccgtgtctgtcgtcaactcctgtgcccgctgcttcttccattctgtctgcccagcagggatgattgtcaagttcccaggcacggcgcagaagaacacggtctgtgaaccagcttccccaggcgtcagccctgcctgtgccagcccggagaactgcaaggaaccctccagtggcaccatcccccaggccaagcccaccccggtgtccccagcaacctccaatgccagcaccatgcctctaagagggggcacccgcctcgcccaggaagctgcttctaaactgacaagggctccaggctctccctcctccgtgggaaggcctagttcggatccaggtctgtccccaacgcagccgtgcccacaggggtctggcgactgcaggaagcagtgtgagcctgactactacctggacgaggctggccgctgcacggcctgcgtgagctgttctcgagacgacctcgtagagaagacgccgtgtgcatggaactcctcccgcatctgcgaatgtcggcctggcatgatctgtgccacatcagccaccaactcctgtgcccgctgtgtcccctacccaatctgtgcagcagagacaggcaccaagccccaggatatggctgagaaggacaccacctttgaggcgccacccgtggggacccagcctgactgcagccccaccccagagaatggcgaggcgcctgccagtaccagccccactctgagctccctggtggactcccaggccagtaagacgctgcccatcccaaccagcgctcccatcgctctctcctccacggggaagcccgttctggatgcagggccagtgctcttctgggtgatcctggtgctggctgtggtggtcggctccagcaccttcctcctgtgccaccggagggcctgcaggaagcgaattcgccagaagctccacctgtgctacccggtccagacctcccggcccaagctagagcttgtggattccagacccaggaggagctcaacgcagttcgagagtggtacatttgtgacaaaacccagtgcggaagagctggggttaatgagcctgccaccgaaggagacctgccgcaacgtgggggcagcctgcccggagagcctgccgctgtgggatgccagcccggccgggggcccctcgtcccccagggaccttcctgagccccgggtgtccacggagcacaccaataacaggattgagaaaatctacatcatgaaggccgacactgtgatcgtgggaactgtgaaggctgagctgccagagggccagggcctggcggggccggcagagcccgagttggaggaggagctggaggcggaccatgccccccactaccccgagcaggagacagaaccgcctctgggcagctgcagtgatgtcatgctgtccgtggaagaggaagggaaagaagaccccttgcccacagctgcctctggaaagtga

SEQ ID NO: 1106 - protein, 595 aa, Artificial
  unknown organism
MRVLLAALGLLFLGALRAFPQDRPFEDTCRGNPGHYYDKAVRRCCYRCPTGLFPTQQCPQRPADCRKQCEPDYYLDEAGRCTACVSCSRDDLVEKMPCAWNSSRVCECQPGMFCAVSVVNSCARCFFHSVCPAGMIVKFPGTAQKNTVCEPASPGVSPACASPENCKEPSSGTIPQAKPTPVSPATSNASTMPLRGGTRLAQEAASKLTRAPGSPSSVGRPSSDPGLSPTQPCPQGSGDCRKQCEPDYYLDEAGRCTACVSCSRDDLVEKTPCAWNSSRICECRPGMICATSATNSCARCVPYPICAAETGTKPQDMAEKDTTFEAPPVGTQPDCSPTPENGEAPASTSPTLSSLVDSQASKTLPIPTSAPIALSSTGKPVLDAGPVLFWVILVLAVVVGSSTFLLCHRRACRKRIRQKLHLCYPVQTSRPKLELVDSRPRRSSTQFESGTFVTKPSAEELGLMSLPPKETCRNVGAACPESLPLWDASPAGGPSSPRDLPEPRVSTEHTNNRIEKIYIMKADTVIVGTVKAELPEGQGLAGPAEPELEEELEADHAPHYPEQETEPPLGSCSDVMLSVEEEGKEDPLPTAASGK

SEQ ID NO: 1107 - DNA, 3768 bp, human
atggagctggcggccttgtgccgctgggggctcctcctcgccctcttgccccccggagccgcgagcacccaagtgtgcaccggcacagacatgaagctgcggctccctgccagtcccgagacccacctggacatgctccgccacctctaccagggctgccaggtggtgcagggaaacctggaactcacctacctgcccaccaatgccagcctgtccttcctgcaggatatccaggaggtgcagggctacgtgctcatcgctcacaaccaagtgaggcaggtcccactgcagaggctgcggattgtgcgaggcacccagctctttgaggacaactatgccctggccgtgctagacaatggagacccgctgaacaataccacccctgtcacaggggcctccccaggaggcctgcgggagctgcagcttcgaagcctcacagagatcttgaaaggaggggtcttgatccagcggaacccccagctctgctaccaggacacgattttgtggaaggacatcttccacaagaacaaccagctggctctcacactgatagacaccaaccgctctcgggcctgccacccctgttctccgatgtgtaagggctcccgctgctggggagagagttctgaggattgtcagagcctgacgcgcactgtctgtgccggtggctgtgcccgctgcaaggggccactgcccactgactgctgccatgagcagtgtgctgccggctgcacgggccccaagcactctgactgcctggcctgcctccacttcaaccacagtggcatctgtgagctgcactgcccagccctggtcacctacaacacagacacgtttgagtccatgcccaatcccgagggccggtatacattcggcgccagctgtgtgactgcctgtccctacaactacctttctacggacgtgggatcctgcaccctcgtctgccccctgcacaaccaagaggtgacagcagaggatggaacacagcggtgtgagaagtgcagcaagccctgtgcccgagtgtgctatggtctgggcatggagcacttgcgagaggtgagggcagttaccagtgccaatatccaggagtttgctggctgcaagaagatctttgggagcctggcatttctgccggaaagctttgatggggacccagcctccaacactgccccgctccagccagagcagctccaagtgtttgagactctggaagagatcacaggttacctatacatctcagcatggccggacagcctgcctgacctcagcgtcttccagaacctgcaagtaatccggggacgaattctgcacaatggcgcctactcgctgaccctgcaagggctgggcatcagctggctggggctgcgctcactgagggaactgggcagtggactggccctcatccaccataacacccacctctgcttcgtgcacacggtgccctgggaccagctctttcggaacccgcaccaagctctgctccacactgccaaccggccagaggacgagtgtgtgggcgagggcctggcctgccaccagctgtgcgcccgagggcactgctggggtccagggcccacccagtgtgtcaactgcagccagttccttcggggccaggagtgcgtggaggaatgccgagtactgcaggggctccccagggagtatgtgaatgccaggcactgtttgccgtgccaccctgagtgtcagccccagaatggctcagtgacctgttttggaccggaggctgaccagtgtgtggcctgtgcccactataaggaccctcccttctgcgtggcccgctgccccagcggtgtgaaacctgacctctcctacatgcccatctggaagtttccagatgaggagggcgcatgccagccttgccccatcaactgcacccactcctgtgtggacctggatgacaagggctgccccgccgagcagagagccagccctctgacgtccatcatctctgcggtggttggcattctgctggtcgtggtcttgggggtggtctttgggatcctcatcaagcgacggcagcagaagatccggaagtacacgatgcggagactgctgcaggaaacggagctggtggagccgctgacacctagcggagcgatgcccaaccaggcgcagatgcggatcctgaaagagacggagctgaggaaggtgaaggtgcttggatctggcgcttttggcacagtctacaagggcatctggatccctgatggggagaatgtgaaaattccagtggccatcaaagtgttgagggaaaacacatcccccaaagccaacaaagaaatcttagacgaagcatacgtgatggctggtgtgggctccccatatgtctcccgccttctgggcatctgcctgacatccacggtgcagctggtgacacagcttatgccctatggctgcctcttagaccatgtccgggaaaaccgcggacgcctgggctcccaggacctgctgaactggtgtatgcagattgccaaggggatgagctacctggaggatgtgcggctcgtacacagggacttggccgctcggaacgtgctggtcaagagtcccaaccatgtcaaaattacagacttcgggctggctcggctgctggacattgacgagacagagtaccatgcagatgggggcaaggtgcccatcaagtggatggcgctggagtccattctccgccggcggttcacccaccagagtgatgtgtggagttatggtgtgactgtgtgggagctgatgacttttggggccaaaccttacgatgggatcccagcccgggagatccctgacctgctggaaaagggggagcggctgccccagccccccatctgcaccattgatgtctacatgatcatggtcaaatgttggatgattgactctgaatgtcggccaagattccgggagttggtgtctgaattctcccgcatggccagggacccccagcgctttgtggtcatccagaatgaggacttgggcccagccagtcccttggacagcaccttctaccgctcactgctggaggacgatgacatgggggacctggtggatgctgaggagtatctggtaccccagcagggcttcttctgtccagaccctgccccgggcgctgggggcatggtccaccacaggcaccgcagctcatctaccaggagtggcggtggggacctgacactagggctggagccctctgaagaggaggcccccaggtctccactggcaccctccgaaggggctggctccgatgtatttgatggtgacctgggaatgggggcagccaaggggctgcaaagcctccccacacatgaccccagccctctacagcggtacagtgaggaccccacagtacccctgccctctgagactgatggctacgttgcccccctgacctgcagcccccagcctgaatatgtgaaccagccagatgttcggccccagcccccttcgccccgagagggccctctgcctgctgcccgacctgctggtgccactctggaaaggcccaagactctctccccagggaagaatggggtcgtcaaagacgtttttgcctttgggggtgccgtggagaaccccgagtacttgacaccccagggaggagctgcccctcagccccaccctcctcctgccttcagcccagccttcgacaacctctattactgggaccaggacccaccagagcggggggctccacccagcaccttcaaagggacacctacggcagagaacccagagtacctgggtctggacgtgccagtgtga

SEQ ID NO: 1108 - protein, 1255 aa, human [sequence omitted]

SEQ ID NO: 1109 - DNA, 3768 bp, Artificial
  unknown organism
atggagctggcggccttgtgccgctgggggctcctcctcgccctcttgccccccggagccgcgagcacccaagtgtgcaccggcacagacatgaagctgcggctccctgccagtcccgagacccacctggacatgctccgccacctctaccagggctgccaggtggtgcagggaaacctggaactcacctacctgcccaccaatgccagcctgtccttcctgcaggatatccaggaggtgcagggctacgtgctcatcgctcacaaccaagtgaggcaggtcccactgcagaggctgcggattgtgcgaggcacccagctctttgaggacaactatgccctggccgtgctagacaatggagacccgctgaacaataccacccctgtcacaggggcctccccaggaggcctgcgggagctgcagcttcgaagcctcacagagatcttgaaaggaggggtcttgatccagcggaacccccagctctgctaccaggacacgattttgtggaaggacatcttccacaagaacaaccagctggctctcacactgatagacaccaaccgctctcgggcctgccacccctgttctccagtgtgtaagggctcccgctgctggggagagagttctgaggattgtcagagcctgacgcgcactgtctgtgccggtggctgtgcccgctgcaaggggccactgcccactgactgctgccatgagcagtgtgctgccggctgcacgggccccaagcactctgactgcctggcctgcctccacttcaaccacagtggcatctgtgagctgcactgcccagccctggtcacctacaacacagacacgtttgagtccatgcccaatcccgagggccggtatacattcggcgccagctgtgtgactgcctgtccctacaactacctttctacggacgtgggatcctgcaccctcgtctgccccctgcacaaccaagaggtgacagcagaggatggaacacagcggtgtgagaagtgcagcaagccctgtgcccgagtgtgctatggtctgggcatggagcacttgcgagaggtgagggcagttaccagtgccaatatccaggagtttgctggctgcaagaagatctttgggagcctggcatttctgccggaaagctttgatggggacccagcctccaacactgccccgcttcagccggagcagctccgagtgtttgagactctggaagagatcacaggttacctatacatctcagcatggccagacagcctgcctgaccttagcgtcctccagaacctgcaagtaatccggggacgaattctgcacaatggcgcctactcgctgaccctgcaagggctgggcatcagctggctggggctgcgctcactgagggaactgggcagtggactggccctcatccaccataacacccgcctctgctttgtgcacacggtgccctgggaccagctctttcggaacccgcaccaagctctgctccacactgccaaccggccagaggacgagtgtgtgggcgagggcctggcctgccaccagctgtgcgcccgagggcactgctggggtccagggcccacccagtgtgtcaactgcagccagttccttcggggccaggagtgcgtggaggaatgccgagtactgcaggggctccccagggagtatgtgaatgccaggcactgtttgccgtgccaccctgagtgtcagccccagaatggctcagtgacctgttttggaccggaggctgaccagtgtgtggcctgtgcccactataaggaccctcccttctgcgtggcccgctgccccagcggtgtgaaacctgacctctcctacatgcccatctggaagtttccagatgaggagggcacgtgccagtcttgccccatcaactgcacccactcctgtgtggacctggatgacaagggctgccccgccgagcagagagccagccctctgactagtatcatctctgcggtggttggcattctgctggtcgtggtcttgggggtggtctttgggatcctcatcaagcgacggcagcagaagatccggaagtacacgatgcggagactgctgcaggaaacggagctggtggagccgctgacacctagcggagcgatgcccaaccaggcgcagatgcggatcctgaaagagacggagctgaggaaggtgaaggtgcttggatctggcgcttttggcacagtctacaagggcatctggatccctgatggggagaatgtgaaaattccagtggccatcaaagtgttgagggaaaacacatcccccaaagccaacaaagaaatcttagacgaagcatacgtgatggctggtgtgggctccccatatgtctcccgccttctgggcatctgcctgacatccacggtgcagctggtgacacagcttatgccctatggctgcctcttagaccatgtccgggaaaaccgcggacgcctgggctcccaggacctgctgaactggtgtatgcagattgccaaggggatgagctacctggaggatgtgcggctcgtacacagggacttggccgctcggaacgtgctggtcaagagtcccaaccatgtcaaaattacagacttcgggctggctcggctgctggacattgacgagacagagtaccatgcagatgggggcaaggtgcccatcaagtggatggcgctggagtccattctccgccggcggttcacccaccagagtgatgtgtggagttatggtgtgactgtgtgggagctgatgacttttggggccaaaccttacgatgggatcccagcccgggagatccctgacctgctggaaaagggggagcggctgccccagccccccatctgcaccattgatgtctacatgatcatggtcaaatgttggatgattgactctgaatgtcggccaagattccgggagttggtgtctgaattctcccgcatggccagggacccccagcgctttgtggtcatccagaatgaggacttgggcccagccagtcccttggacagcaccttctaccgctcactgctggaggacgatgacatgggggacctggtggatgctgaggagtatctggtaccccagcagggcttcttctgtccagaccctgccccgggcgctgggggcatggtccaccacaggcaccgcagctcatctaccaggagtggcggtggggacctgacactagggctggagccctctgaagaggaggcccccaggtctccactggcaccctccgaaggggctggctccgatgtatttgatggtgacctgggaatgggggcagccaaggggctgcaaagcctccccacacatgaccccagccctctacagcggtacagtgaggaccccacagtacccctgccctctgagactgatggctacgttgcccccctgacctgcagcccccagcctgaatatgtgaaccagccagatgttcggccccagcccccttcgccccgagagggccctctgcctgctgcccgacctgctggtgccactctggaaaggcccaagactctctccccagggaagaatggggtcgtcaaagacgtttttgcctttgggggtgccgtggagaaccccgagtacttgacaccccagggaggagctgcccctcagccccaccctcctcctgccttcagcccagccttcgacaacctctattactgggaccaggacccaccagagcggggggctccacccagcaccttcaaagggacacctacggcagagaacccagagtacctgggtctggacgtgccagtgtga

SEQ ID NO: 1110 - protein, 1255 aa, Artificial
  unknown organism
MELAALCRWGLLLALLPPGAASTQVCTGTDMKLRLPASPETHLDMLRHLYQGCQVVQGNLELTYLPTNASLSFLQDIQEVQGYVLIAHNQVRQVPLQRLRIVRGTQLFEDNYALAVLDNGDPLNNTTPVTGASPGGLRELQLRSLTEILKGGVLIQRNPQLCYQDTILWKDIFHKNNQLALTLIDTNRSRACHPCSPVCKGSRCWGESSEDCQSLTRTVCAGGCARCKGPLPTDCCHEQCAAGCTGPKHSDCLACLHFNHSGICELHCPALVTYNTDTFESMPNPEGRYTFGASCVTACPYNYLSTDVGSCTLVCPLHNQEVTAEDGTQRCEKCSKPCARVCYGLGMEHLREVRAVTSANIQEFAGCKKIFGSLAFLPESFDGDPASNTAPLQPEQLRVFETLEEITGYLYISAWPDSLPDLSVLQNLQVIRGRILHNGAYSLTLQGLGISWLGLRSLRELGSGLALIHHNTRLCFVHTVPWDQLFRNPHQALLHTANRPEDECVGEGLACHQLCARGHCWGPGPTQCVNCSQFLRGQECVEECRVLQGLPREYVNARHCLPCHPECQPQNGSVTCFGPEADQCVACAHYKDPPFCVARCPSGVKPDLSYMPIWKFPDEEGTCQSCPINCTHSCVDLDDKGCPAEQRASPLTSIISAVVGILLVVVLGVVFGILIKRRQQKIRKYTMRRLLQETELVEPLTPSGAMPNQAQMRILKETELRKVKVLGSGAFGTVYKGIWIPDGENVKIPVAIKVLRENTSPKANKEILDEAYVMAGVGSPYVSRLLGICLTSTVQLVTQLMPYGCLLDHVRENRGRLGSQDLLNWCMQIAKGMSYLEDVRLVHRDLAARNVLVKSPNHVKITDFGLARLLDIDETEYHADGGKVPIKWMALESILRRRFTHQSDVWSYGVTVWELMTFGAKPYDGIPAREIPDLLEKGERLPQPPICTIDVYMIMVKCWMIDSECRPRFRELVSEFSRMARDPQRFVVIQNEDLGPASPLDSTFYRSLLEDDDMGDLVDAEEYLVPQQGFFCPDPAPGAGGMVHHRHRSSSTRSGGGDLTLGLEPSEEEAPRSPLAPSEGAGSDVFDGDLGMGAAKGLQSLPTHDPSPLQRYSEDPTVPLPSETDGYVAPLTCSPQPEYVNQPDVRPQPPSPREGPLPAARPAGATLERPKTLSPGKNGVVKDVFAFGGAVENPEYLTPQGGAAPQPHPPPAFSPAFDNLYYWDQDPPERGAPPSTFKGTPTAENPEYLGLDVPV

SEQ ID NO: 1111 - DNA, 843 bp, Artificial
  unknown organism
atgggatggagctgtatcatcctcttcttggtagcaacagctacaggtgtacactcccaagatggtaatgaagaaatgggtggtattacacagacaccatataaagtctccatctctggaaccacagtaatattgacatccggagagcccaaatcttgtgacaaaactcacacatgcccaccgtgcccagcacctgaactcctggggggaccgtcagtcttcctcttccccccaaaacccaaggacaccctcatgatctcccggacccctgaggtcacatgcgtggtggtggacgtgagccacgaagaccctgaggtcaagttcaactggtacgtggacggcgtggaggtgcataatgccaagacaaagccgcgggaggagcagtacaacagcacgtaccgtgtggtcagcgtcctcaccgtcctgcaccaggactggctgaatggcaaggagtacaagtgcaaggtctccaacaaagccctcccagcccccatcgagaaaaccatctccaaagccaaagggcagccccgagaaccacaggtgtacaccctgcccccatcccgggaggagatgaccaagaaccaggtcagcctgacctgcctggtcaaaggcttctatcccagcgacatcgccgtggagtgggagagcaatgggcagccggagaacaactacaagaccacgcctcccgtgctggactccgacggctccttcttcctctatagcaagctcaccgtggacaagagcaggtggcagcaggggaacgtcttctcatgctccgtgatgcatgaggctctgcacaaccactacacgcagaagagcctctccctgtccccgggtaaatag

SEQ ID NO: 1112 - protein, 280 aa, Artificial
  unknown organism
MGWSCIILFLVATATGVHSQDGNEEMGGITQTPYKVSISGTTVILTSGEPKSCDKTHTCPPCPAPELLGGPSVFLFPPKPKDTLMISRTPEVTCVVVDVSHEDPEVKFNWYVDGVEVHNAKTKPREEQYNSTYRVVSVLTVLHQDWLNGKEYKCKVSNKALPAPIEKTISKAKGQPREPQVYTLPPSREEMTKNQVSLTCLVKGFYPSDIAVEWESNGQPENNYKTTPPVLDSDGSFFLYSKLTVDKSRWQQGNVFSCSVMHEALHNHYTQKSLSLSPGK

SEQ ID NO: 1113 - protein, 112 aa, Artificial
  unknown organism
QVQLQQWGAGLLKPSETLSLTCAVYGGSFSAYYWSWIRQPPGKGLEWIGDINHGGGTNYNPSLKSRVTISVDTSKNQFSLKLNSVTAADTAVYYCASLTAYWGQGSLVTVSS

SEQ ID NO: 1114 - protein, 5 aa, Artificial
  unknown organism
AYYWS

SEQ ID NO: 1115 - protein, 16 aa, Artificial
  unknown organism
DINHGGGTNYNPSLKS

SEQ ID NO: 1116 - protein, 4 aa, Artificial
  unknown organism
LTAY

SEQ ID NO: 1117 - DNA, 336 bp, Artificial
  unknown organism
caggtgcagctacagcagtggggcgcaggactgttgaagccttcggagaccctgtccctcacctgcgctgtctatggtgggtccttcagtgcttactactggagctggatccgccagcccccagggaaggggctggagtggattggggacatcaatcatggtggaggcaccaactacaacccgtccctcaagagtcgagtcaccatatcagtagacacgtccaagaaccagttctccctgaagctgaactctgtaaccgccgcggacacggctgtgtattactgtgcgagcctaactgcctactggggccagggaagcctggtcaccgtctcctca

SEQ ID NO: 1118 - protein, 107 aa, Artificial
  unknown organism
DIQMTQSPTSLSASVGDRVTITCRASQGISSWLTWYQQKPEKAPKSLIYAASSLQSGVPSRFSGSGSGTDFTLTISSLQPEDFATYYCQQYDSYPITFGQGTRLEIK

SEQ ID NO: 1119 - protein, 11 aa, Artificial
  unknown organism
RASQGISSWLT

SEQ ID NO: 1120 - protein, 7 aa, Artificial
  unknown organism
AASSLQS

SEQ ID NO: 1121 - protein, 9 aa, Artificial
  unknown organism
QQYDSYPIT

SEQ ID NO: 1122 - DNA, 321 bp, Artificial
  unknown organism
gacatccagatgacccagtctccaacctcactgtctgcatctgtaggagacagagtcaccatcacttgtcgggcgagtcagggtattagcagctggttaacctggtatcagcagaaaccagagaaagcccctaagtccctgatctatgctgcatccagtttgcaaagtggggtcccatcaaggttcagcggcagtggatctgggacagatttcactctcaccatcagcagcctgcagcctgaagattttgcaacttattactgccaacagtatgatagttaccctatcaccttcggccaagggacacgactggagattaaa

SEQ ID NO: 1123 - protein, 234 aa, Artificial
  unknown organism
QVQLQQWGAGLLKPSETLSLTCAVYGGSFSAYYWSWIRQPPGKGLEWIGDINHGGGTNYNPSLKSRVTISVDTSKNQFSLKLNSVTAADTAVYYCASLTAYWGQGSLVTVSSGGGGSGGGGSGGGGSDIQMTQSPTSLSASVGDRVTITCRASQGISSWLTWYQQKPEKAPKSLIYAASSLQSGVPSRFSGSGSGTDFTLTISSLQPEDFATYYCQQYDSYPITFGQGTRLEIK

SEQ ID NO: 1124 - DNA, 702 bp, Artificial
  unknown organism
caggtgcagctacagcagtggggcgcaggactgttgaagccttcggagaccctgtccctcacctgcgctgtctatggtgggtccttcagtgcttactactggagctggatccgccagcccccagggaaggggctggagtggattggggacatcaatcatggtggaggcaccaactacaacccgtccctcaagagtcgagtcaccatatcagtagacacgtccaagaaccagttctccctgaagctgaactctgtaaccgccgcggacacggctgtgtattactgtgcgagcctaactgcctactggggccagggaagcctggtcaccgtctcctcaggtggtggtggttctggcggcggcggctccggtggtggtggttctgacatccagatgacccagtctccaacctcactgtctgcatctgtaggagacagagtcaccatcacttgtcgggcgagtcagggtattagcagctggttaacctggtatcagcagaaaccagagaaagcccctaagtccctgatctatgctgcatccagtttgcaaagtggggtcccatcaaggttcagcggcagtggatctgggacagatttcactctcaccatcagcagcctgcagcctgaagattttgcaacttattactgccaacagtatgatagttaccctatcaccttcggccaagggacacgactggagattaaa

SEQ ID NO: 1125 - protein, 489 aa, Artificial
  unknown organism
QVQLQQWGAGLLKPSETLSLTCAVYGGSFSAYYWSWIRQPPGKGLEWIGDINHGGGTNYNPSLKSRVTISVDTSKNQFSLKLNSVTAADTAVYYCASLTAYWGQGSLVTVSSGGGGSGGGGSGGGGSDIQMTQSPTSLSASVGDRVTITCRASQGISSWLTWYQQKPEKAPKSLIYAASSLQSGVPSRFSGSGSGTDFTLTISSLQPEDFATYYCQQYDSYPITFGQGTRLEIKSGGGGSEVQLVESGGGLVQPGGSLKLSCAASGFTFNKYAMNWVRQAPGKGLEWVARIRSKYNNYATYYADSVKDRFTISRDDSKNTAYLQMNNLKTEDTAVYYCVRHGNFGNSYISYWAYWGQGTLVTVSSGGGGSGGGGSGGGGSQTVVTQEPSLTVSPGGTVTLTCGSSTGAVTSGNYPNWVQQKPGQAPRGLIGGTKFLAPGTPARFSGSLLGGKAALTLSGVQPEDEAEYYCVLWYSNRWVFGGGTKLTVL

SEQ ID NO: 1126 - DNA, 1467 bp, Artificial
  unknown organism
caggtgcagctacagcagtggggcgcaggactgttgaagccttcggagaccctgtccctcacctgcgctgtctatggtgggtccttcagtgcttactactggagctggatccgccagcccccagggaaggggctggagtggattggggacatcaatcatggtggaggcaccaactacaacccgtccctcaagagtcgagtcaccatatcagtagacacgtccaagaaccagttctccctgaagctgaactctgtaaccgccgcggacacggctgtgtattactgtgcgagcctaactgcctactggggccagggaagcctggtcaccgtctcctcaggtggtggtggttctggcggcggcggctccggtggtggtggttctgacatccagatgacccagtctccaacctcactgtctgcatctgtaggagacagagtcaccatcacttgtcgggcgagtcagggtattagcagctggttaacctggtatcagcagaaaccagagaaagcccctaagtccctgatctatgctgcatccagtttgcaaagtggggtcccatcaaggttcagcggcagtggatctgggacagatttcactctcaccatcagcagcctgcagcctgaagattttgcaacttattactgccaacagtatgatagttaccctatcaccttcggccaagggacacgactggagattaaatccggaggtggtggctccgaggtgcagctggtcgagtctggaggaggattggtgcagcctggagggtcattgaaactctcatgtgcagcctctggattcaccttcaataagtacgccatgaactgggtccgccaggctccaggaaagggtttggaatgggttgctcgcataagaagtaaatataataattatgcaacatattatgccgattcagtgaaagacaggttcaccatctccagagatgattcaaaaaacactgcctatctacaaatgaacaacttgaaaactgaggacactgccgtgtactactgtgtgagacatgggaacttcggtaatagctacatatcctactgggcttactggggccaagggactctggtcaccgtctcctcaggtggtggtggttctggcggcggcggctccggtggtggtggttctcagactgttgtgactcaggaaccttcactcaccgtatcacctggtggaacagtcacactcacttgtggctcctcgactggggctgttacatctggcaactacccaaactgggtccaacaaaaaccaggtcaggcaccccgtggtctaataggtgggactaagttcctcgcccccggtactcctgccagattctcaggctccctgcttggaggcaaggctgccctcaccctctcaggggtacagccagaggatgaggcagaatattactgtgttctatggtacagcaaccgctgggtgttcggtggaggaaccaaactgactgtccta

SEQ ID NO: 1127 - protein, 123 aa, Artificial
  unknown organism
EVQLQESGGGLVQPGGSLRLSCAASGFTFTTYTIHWVRQAPGKGLEWVSYINPSSGYSDYNQNFKGRFTTSANKSKNTAYLQMNSLRAEDTAVYYCARRADYGNYKYTWFPYWGQGTLVTVSS

SEQ ID NO: 1128 - protein, 5 aa, Artificial
  unknown organism
TYTIH

SEQ ID NO: 1129 - protein, 17 aa, Artificial
  unknown organism
YINPSSGYSDYNQNFKG

SEQ ID NO: 1130 - protein, 14 aa, Artificial
  unknown organism
RADYGNYKYTWFPY

SEQ ID NO: 1131 - DNA, 369 bp, Artificial
  unknown organism
gaagttcaactgcaggaatccggtggtggtctggttcagccaggtggttccctgcgtctctcgtgcgctgcctccggtttcaccttcaccacctacaccatccactgggtacgtcaggccccgggtaaaggtctggaatgggtttcctacatcaacccatcgtccggctactccgactacaaccagaacttcaaaggtcgtttcaccacctcagctaacaaatccaaaaacactgcttacctccagatgaactccctccgtgctgaagacactgctgtttactattgcgcgcgtcgtgccgactacggtaactacaaatacacctggttcccttactggggtcagggcacgctggttaccgtttcctcc

SEQ ID NO: 1132 - protein, 107 aa, Artificial
  unknown organism
DIELTQSPSSLSASVGDRVTITCKASQNVGTNVAWYQQKPGKAPKVLIYSASYRYSGVPSRFSGSGSGTDFTLTISSLQPEDFATYYCQQYHTYPLTFGQGTKLEIK

SEQ ID NO: 1133 - protein, 11 aa, Artificial
  unknown organism
KASQNVGTNVA

SEQ ID NO: 1134 - protein, 7 aa, Artificial
  unknown organism
SASYRYS

SEQ ID NO: 1135 - protein, 9 aa, Artificial
  unknown organism
QQYHTYPLT

SEQ ID NO: 1136 - DNA, 321 bp, Artificial
  unknown organism
gacatcgagctcacccaatccccgtcctccctgtccgcttccgttggcgaccgtgttaccatcacctgcaaggcctcccagaatgtaggcactaacgtagcttggtaccagcagaaaccgggtaaagctccgaaagttctgatctattccgcttcctatcgatactccggtgttccatcccgtttctctggatccggttccggcaccgacttcaccctgacgatctcctccctccagccggaagacttcgctacctactactgccagcagtaccacacctacccgttaaccttcggtcagggcaccaaactcgagatcaaa

SEQ ID NO: 1137 - protein, 245 aa, Artificial
  unknown organism
EVQLQESGGGLVQPGGSLRLSCAASGFTFTTYTIHWVRQAPGKGLEWVSYINPSSGYSDYNQNFKGRFTTSANKSKNTAYLQMNSLRAEDTAVYYCARRADYGNYKYTWFPYWGQGTLVTVSSGGGGSGGGGSGGGGSDIELTQSPSSLSASVGDRVTITCKASQNVGTNVAWYQQKPGKAPKVLIYSASYRYSGVPSRFSGSGSGTDFTLTISSLQPEDFATYYCQQYHTYPLTFGQGTKLEIK

SEQ ID NO: 1138 - protein, 500 aa, Artificial
  unknown organism
EVQLQESGGGLVQPGGSLRLSCAASGFTFTTYTIHWVRQAPGKGLEWVSYINPSSGYSDYNQNFKGRFTTSANKSKNTAYLQMNSLRAEDTAVYYCARRADYGNYKYTWFPYWGQGTLVTVSSGGGGSGGGGSGGGGSDIELTQSPSSLSASVGDRVTITCKASQNVGTNVAWYQQKPGKAPKVLIYSASYRYSGVPSRFSGSGSGTDFTLTISSLQPEDFATYYCQQYHTYPLTFGQGTKLEIKSGGGGSEVQLVESGGGLVQPGGSLKLSCAASGFTFNKYAMNWVRQAPGKGLEWVARIRSKYNNYATYYADSVKDRFTISRDDSKNTAYLQMNNLKTEDTAVYYCVRHGNFGNSYISYWAYWGQGTLVTVSSGGGGSGGGGSGGGGSQTVVTQEPSLTVSPGGTVTLTCGSSTGAVTSGNYPNWVQQKPGQAPRGLIGGTKFLAPGTPARFSGSLLGGKAALTLSGVQPEDEAEYYCVLWYSNRWVFGGGTKLTVL

SEQ ID NO: 1139 - DNA, 1500 bp, Artificial
  unknown organism
gaagttcaactgcaggaatccggtggtggtctggttcagccaggtggttccctgcgtctctcgtgcgctgcctccggtttcaccttcaccacctacaccatccactgggtacgtcaggccccgggtaaaggtctggaatgggtttcctacatcaacccatcgtccggctactccgactacaaccagaacttcaaaggtcgtttcaccacctcagctaacaaatccaaaaacactgcttacctccagatgaactccctccgtgctgaagacactgctgtttactattgcgcgcgtcgtgccgactacggtaactacaaatacacctggttcccttactggggtcagggcacgctggttaccgtttcctccggtggtggtggttctggcggcggcggctccggtggtggtggttctgacatcgagctcacccaatccccgtcctccctgtccgcttccgttggcgaccgtgttaccatcacctgcaaggcctcccagaatgtaggcactaacgtagcttggtaccagcagaaaccgggtaaagctccgaaagttctgatctattccgcttcctatcgatactccggtgttccatcccgtttctctggatccggttccggcaccgacttcaccctgacgatctcctccctccagccggaagacttcgctacctactactgccagcagtaccacacctacccgttaaccttcggtcagggcaccaaactcgagatcaaatccggaggtggtggctccgaggtgcagctggtcgagtctggaggaggattggtgcagcctggagggtcattgaaactctcatgtgcagcctctggattcaccttcaataagtacgccatgaactgggtccgccaggctccaggaaagggtttggaatgggttgctcgcataagaagtaaatataataattatgcaacatattatgccgattcagtgaaagacaggttcaccatctccagagatgattcaaaaaacactgcctatctacaaatgaacaacttgaaaactgaggacactgccgtgtactactgtgtgagacatgggaacttcggtaatagctacatatcctactgggcttactggggccaagggactctggtcaccgtctcctcaggtggtggtggttctggcggcggcggctccggtggtggtggttctcagactgttgtgactcaggaaccttcactcaccgtatcacctggtggaacagtcacactcacttgtggctcctcgactggggctgttacatctggcaactacccaaactgggtccaacaaaaaccaggtcaggcaccccgtggtctaataggtgggactaagttcctcgcccccggtactcctgccagattctcaggctccctgcttggaggcaaggctgccctcaccctctcaggggtacagccagaggatgaggcagaatattactgtgttctatggtacagcaaccgctgggtgttcggtggaggaaccaaactgactgtccta

SEQ ID NO: 1140 - protein, 121 aa, Artificial
  unknown organism
EVQLLEQSGAELVRPGALVKLSCKASGFKIKDYFVNWVKQRPEQGLEWIGWIDPENDNSLYGPNFQDKASITADTSSNTGYLQLSGLTSEDTAVYYCALYYGSRGDAMDYWGQGTTVTVSS

SEQ ID NO: 1141 - protein, 5 aa, Artificial
  unknown organism
DYFVN

SEQ ID NO: 1142 - protein, 17 aa, Artificial
  unknown organism
WIDPENDNSLYGPNFQD

SEQ ID NO: 1143 - protein, 11 aa, Artificial
  unknown organism
YYGSRGDAMDY

SEQ ID NO: 1144 - DNA, 363 bp, Artificial
  unknown organism
gaggtgcagctgctcgagcagtctggagctgagcttgtgaggccaggggccttagtcaagttgtcctgcaaagcttctggcttcaaaattaaagactactttgtgaactgggtgaagcagaggcctgaacagggcctggagtggattggatggattgatcctgagaatgataatagtttatatggcccgaacttccaggacaaggccagtatcacagcagacacatcctccaacacaggctacctgcagctcagcggcctgacatctgaggacactgccgtctattactgtgctctttattacggaagtaggggggatgctatggactactggggccaagggaccacggtcaccgtctcctca

SEQ ID NO: 1145 - protein, 107 aa, Artificial
  unknown organism
ELVMTQTPSSLSASLGDRVTISCRASQDISNYLNWYQQKPDGTVKLLIYYTSRLHSGVPSRFSGSGSGTDYSLTISNLEQEDIATYFCQQGNTLPLTFGAGTKLEIK

SEQ ID NO: 1146 - protein, 11 aa, Artificial
  unknown organism
RASQDISNYLN

SEQ ID NO: 1147 - protein, 7 aa, Artificial
  unknown organism
YTSRLHS

SEQ ID NO: 1148 - protein, 9 aa, Artificial
  unknown organism
QQGNTLPLT

SEQ ID NO: 1149 - DNA, 321 bp, Artificial
  unknown organism
gagctcgtgatgacccagactccatcctccctgtctgcctctctgggagacagagtcaccatcagttgcagggcaagtcaggacattagcaattatttaaactggtatcagcagaaaccagatggaactgttaaactcctgatctactacacatcaagattacactcaggagtcccatcaaggttcagtggcagtgggtctggaacagattattctctcaccattagcaacctggagcaagaagatattgccacttacttttgccaacagggtaatacgcttccgctcacgttcggtgctgggaccaagcttgagatcaaa

SEQ ID NO: 1150 - protein, 243 aa, Artificial
  unknown organism
EVQLLEQSGAELVRPGALVKLSCKASGFKIKDYFVNWVKQRPEQGLEWIGWIDPENDNSLYGPNFQDKASITADTSSNTGYLQLSGLTSEDTAVYYCALYYGSRGDAMDYWGQGTTVTVSSGGGGSGGGGSGGGGSELVMTQTPSSLSASLGDRVTISCRASQDISNYLNWYQQKPDGTVKLLIYYTSRLHSGVPSRFSGSGSGTDYSLTISNLEQEDIATYFCQQGNTLPLTFGAGTKLEIK

SEQ ID NO: 1151 - DNA, 729 bp, Artificial
  unknown organism
gaggtgcagctgctcgagcagtctggagctgagcttgtgaggccaggggccttagtcaagttgtcctgcaaagcttctggcttcaaaattaaagactactttgtgaactgggtgaagcagaggcctgaacagggcctggagtggattggatggattgatcctgagaatgataatagtttatatggcccgaacttccaggacaaggccagtatcacagcagacacatcctccaacacaggctacctgcagctcagcggcctgacatctgaggacactgccgtctattactgtgctctttattacggaagtaggggggatgctatggactactggggccaagggaccacggtcaccgtctcctcaggtggtggtggttctggcggcggcggctccggtggtggtggttctgagctcgtgatgacccagactccatcctccctgtctgcctctctgggagacagagtcaccatcagttgcagggcaagtcaggacattagcaattatttaaactggtatcagcagaaaccagatggaactgttaaactcctgatctactacacatcaagattacactcaggagtcccatcaaggttcagtggcagtgggtctggaacagattattctctcaccattagcaacctggagcaagaagatattgccacttacttttgccaacagggtaatacgcttccgctcacgttcggtgctgggaccaagcttgagatcaaa

SEQ ID NO: 1152 - protein, 498 aa, Artificial
  unknown organism
EVQLLEQSGAELVRPGALVKLSCKASGFKIKDYFVNWVKQRPEQGLEWIGWIDPENDNSLYGPNFQDKASITADTSSNTGYLQLSGLTSEDTAVYYCALYYGSRGDAMDYWGQGTTVTVSSGGGGSGGGGSGGGGSELVMTQTPSSLSASLGDRVTISCRASQDISNYLNWYQQKPDGTVKLLIYYTSRLHSGVPSRFSGSGSGTDYSLTISNLEQEDIATYFCQQGNTLPLTFGAGTKLEIKSGGGGSEVQLVESGGGLVQPGGSLKLSCAASGFTFNKYAMNWVRQAPGKGLEWVARIRSKYNNYATYYADSVKDRFTISRDDSKNTAYLQMNNLKTEDTAVYYCVRHGNFGNSYISYWAYWGQGTLVTVSSGGGGSGGGGSGGGGSQTVVTQEPSLTVSPGGTVTLTCGSSTGAVTSGNYPNWVQQKPGQAPRGLIGGTKFLAPGTPARFSGSLLGGKAALTLSGVQPEDEAEYYCVLWYSNRWVFGGGTKLTVL

SEQ ID NO: 1153 - DNA, 1494 bp, Artificial
  unknown organism
gaggtgcagctgctcgagcagtctggagctgagcttgtgaggccaggggccttagtcaagttgtcctgcaaagcttctggcttcaaaattaaagactactttgtgaactgggtgaagcagaggcctgaacagggcctggagtggattggatggattgatcctgagaatgataatagtttatatggcccgaacttccaggacaaggccagtatcacagcagacacatcctccaacacaggctacctgcagctcagcggcctgacatctgaggacactgccgtctattactgtgctctttattacggaagtaggggggatgctatggactactggggccaagggaccacggtcaccgtctcctcaggtggtggtggttctggcggcggcggctccggtggtggtggttctgagctcgtgatgacccagactccatcctccctgtctgcctctctgggagacagagtcaccatcagttgcagggcaagtcaggacattagcaattatttaaactggtatcagcagaaaccagatggaactgttaaactcctgatctactacacatcaagattacactcaggagtcccatcaaggttcagtggcagtgggtctggaacagattattctctcaccattagcaacctggagcaagaagatattgccacttacttttgccaacagggtaatacgcttccgctcacgttcggtgctgggaccaagcttgagatcaaatccggaggtggtggatccgaggtgcagctggtcgagtctggaggaggattggtgcagcctggagggtcattgaaactctcatgtgcagcctctggattcaccttcaataagtacgccatgaactgggtccgccaggctccaggaaagggtttggaatgggttgctcgcataagaagtaaatataataattatgcaacatattatgccgattcagtgaaagacaggttcaccatctccagagatgattcaaaaaacactgcctatctacaaatgaacaacttgaaaactgaggacactgccgtgtactactgtgtgagacatgggaacttcggtaatagctacatatcctactgggcttactggggccaagggactctggtcaccgtctcctcaggtggtggtggttctggcggcggcggctccggtggtggtggttctcagactgttgtgactcaggaaccttcactcaccgtatcacctggtggaacagtcacactcacttgtggctcctcgactggggctgttacatctggcaactacccaaactgggtccaacaaaaaccaggtcaggcaccccgtggtctaataggtgggactaagttcctcgcccccggtactcctgccagattctcaggctccctgcttggaggcaaggctgccctcaccctctcaggggtacagccagaggatgaggcagaatattactgtgttctatggtacagcaaccgctgggtgttcggtggaggaaccaaactgactgtccta

SEQ ID NO: 1154 - protein, 122 aa, Artificial
  unknown organism
EVQLLEQSGAELVRPGASVKLSCKASGYIFTAYYINWLRQRPGQGLEWIARIYPGSGFTNYNEKLTGKATLTADESSNTAYMQLTSLTSEDSAVYFCARPGIYYDSTFFTYWGQGTTVTVSS

SEQ ID NO: 1155 - protein, 5 aa, Artificial
  unknown organism
AYYIN

SEQ ID NO: 1156 - protein, 17 aa, Artificial
  unknown organism
RIYPGSGFTNYNEKLTG

SEQ ID NO: 1157 - protein, 12 aa, Artificial
  unknown organism
PGIYYDSTFFTY

SEQ ID NO: 1158 - DNA, 366 bp, Artificial
  unknown organism
gaggtgcagctgctcgagcagtctggagctgaactggtgaggcctggggcttcagtgaagctgtcctgcaaggcttctggctacattttcactgcctactatataaactggctgaggcagaggcctggacagggacttgagtggattgcgaggatttatcctggaagtggctttactaactacaatgagaaactcacgggcaaggccacactgactgctgatgaatcctccaacactgcctacatgcagctcactagcctgacatctgaggactctgctgtctatttctgtgcaagaccgggaatctactatgattcaaccttctttacttactggggccaagggaccacggtcaccgtctcctca

SEQ ID NO: 1159 - protein, 107 aa, Artificial
  unknown organism
ELQMTQSPASLSASVGETVTITCRASENIYSYLAWYQQKQGKSPQLLVYNAKTLAEGVPSRFSGSGSGTQFSLKINSLQPEDFGSYYCQHHYGTPPTFGAGTKLEIK

SEQ ID NO: 1160 - protein, 11 aa, Artificial
  unknown organism
RASENIYSYLA

SEQ ID NO: 1161 - protein, 7 aa, Artificial
  unknown organism
NAKTLAE

SEQ ID NO: 1162 - protein, 9 aa, Artificial
  unknown organism
QHHYGTPPT

SEQ ID NO: 1163 - DNA, 321 bp, Artificial
  unknown organism
gagctccagatgacccagtctccagcctccctatctgcatctgtgggagaaactgtcaccatcacatgtcgagcaagtgagaatatttacagttatttagcatggtatcagcagaaacagggaaaatctcctcagctcctggtctataatgcaaaaaccttagcagaaggtgtgccatcaaggttcagtggcagtggatcaggcacacagttttctctgaagatcaacagcctgcagcctgaagattttgggagttattactgtcaacatcattatggtactcctcccacgttcggtgctgggaccaagcttgagatcaaa

SEQ ID NO: 1164 - protein, 244 aa, Artificial
  unknown organism
EVQLLEQSGAELVRPGASVKLSCKASGYIFTAYYINWLRQRPGQGLEWIARIYPGSGFTNYNEKLTGKATLTADESSNTAYMQLTSLTSEDSAVYFCARPGIYYDSTFFTYWGQGTTVTVSSGGGGSGGGGSGGGGSELQMTQSPASLSASVGETVTITCRASENIYSYLAWYQQKQGKSPQLLVYNAKTLAEGVPSRFSGSGSGTQFSLKINSLQPEDFGSYYCQHHYGTPPTFGAGTKLEIK

SEQ ID NO: 1165 - DNA, 732 bp, Artificial
  unknown organism
gaggtgcagctgctcgagcagtctggagctgaactggtgaggcctggggcttcagtgaagctgtcctgcaaggcttctggctacattttcactgcctactatataaactggctgaggcagaggcctggacagggacttgagtggattgcgaggatttatcctggaagtggctttactaactacaatgagaaactcacgggcaaggccacactgactgctgatgaatcctccaacactgcctacatgcagctcactagcctgacatctgaggactctgctgtctatttctgtgcaagaccgggaatctactatgattcaaccttctttacttactggggccaagggaccacggtcaccgtctcctcaggtggtggtggttctggcggcggcggctccggtggtggtggttctgagctccagatgacccagtctccagcctccctatctgcatctgtgggagaaactgtcaccatcacatgtcgagcaagtgagaatatttacagttatttagcatggtatcagcagaaacagggaaaatctcctcagctcctggtctataatgcaaaaaccttagcagaaggtgtgccatcaaggttcagtggcagtggatcaggcacacagttttctctgaagatcaacagcctgcagcctgaagattttgggagttattactgtcaacatcattatggtactcctcccacgttcggtgctgggaccaagcttgagatcaaa

SEQ ID NO: 1166 - protein, 499 aa, Artificial
  unknown organism
EVQLLEQSGAELVRPGASVKLSCKASGYIFTAYYINWLRQRPGQGLEWIARIYPGSGFTNYNEKLTGKATLTADESSNTAYMQLTSLTSEDSAVYFCARPGIYYDSTFFTYWGQGTTVTVSSGGGGSGGGGSGGGGSELQMTQSPASLSASVGETVTITCRASENIYSYLAWYQQKQGKSPQLLVYNAKTLAEGVPSRFSGSGSGTQFSLKINSLQPEDFGSYYCQHHYGTPPTFGAGTKLEIKSGGGGSEVQLVESGGGLVQPGGSLKLSCAASGFTFNKYAMNWVRQAPGKGLEWVARIRSKYNNYATYYADSVKDRFTISRDDSKNTAYLQMNNLKTEDTAVYYCVRHGNFGNSYISYWAYWGQGTLVTVSSGGGGSGGGGSGGGGSQTVVTQEPSLTVSPGGTVTLTCGSSTGAVTSGNYPNWVQQKPGQAPRGLIGGTKFLAPGTPARFSGSLLGGKAALTLSGVQPEDEAEYYCVLWYSNRWVFGGGTKLTVL

SEQ ID NO: 1167 - DNA, 1497 bp, Artificial
  unknown organism
gaggtgcagctgctcgagcagtctggagctgaactggtgaggcctggggcttcagtgaagctgtcctgcaaggcttctggctacattttcactgcctactatataaactggctgaggcagaggcctggacagggacttgagtggattgcgaggatttatcctggaagtggctttactaactacaatgagaaactcacgggcaaggccacactgactgctgatgaatcctccaacactgcctacatgcagctcactagcctgacatctgaggactctgctgtctatttctgtgcaagaccgggaatctactatgattcaaccttctttacttactggggccaagggaccacggtcaccgtctcctcaggtggtggtggttctggcggcggcggctccggtggtggtggttctgagctccagatgacccagtctccagcctccctatctgcatctgtgggagaaactgtcaccatcacatgtcgagcaagtgagaatatttacagttatttagcatggtatcagcagaaacagggaaaatctcctcagctcctggtctataatgcaaaaaccttagcagaaggtgtgccatcaaggttcagtggcagtggatcaggcacacagttttctctgaagatcaacagcctgcagcctgaagattttgggagttattactgtcaacatcattatggtactcctcccacgttcggtgctgggaccaagcttgagatcaaatccggaggtggtggatccgaggtgcagctggtcgagtctggaggaggattggtgcagcctggagggtcattgaaactctcatgtgcagcctctggattcaccttcaataagtacgccatgaactgggtccgccaggctccaggaaagggtttggaatgggttgctcgcataagaagtaaatataataattatgcaacatattatgccgattcagtgaaagacaggttcaccatctccagagatgattcaaaaaacactgcctatctacaaatgaacaacttgaaaactgaggacactgccgtgtactactgtgtgagacatgggaacttcggtaatagctacatatcctactgggcttactggggccaagggactctggtcaccgtctcctcaggtggtggtggttctggcggcggcggctccggtggtggtggttctcagactgttgtgactcaggaaccttcactcaccgtatcacctggtggaacagtcacactcacttgtggctcctcgactggggctgttacatctggcaactacccaaactgggtccaacaaaaaccaggtcaggcaccccgtggtctaataggtgggactaagttcctcgcccccggtactcctgccagattctcaggctccctgcttggaggcaaggctgccctcaccctctcaggggtacagccagaggatgaggcagaatattactgtgttctatggtacagcaaccgctgggtgttcggtggaggaaccaaactgactgtccta

SEQ ID NO: 1168 - protein, 121 aa, Artificial
  unknown organism
EVQLVQSGAEVKKPGASVKVSCKASGYTFTAYYINWVRQTPGQGLEWMGRIYPGSGFTNYNEKLTGRVTMTADASTNTVYMELSSLRSEDTAVYYCARPGIYYDSTFFTYWGQGTLVTVSS

SEQ ID NO: 1169 - protein, 5 aa, Artificial
  unknown organism
AYYIN

SEQ ID NO: 1170 - protein, 17 aa, Artificial
  unknown organism
RIYPGSGFTNYNEKLTG

SEQ ID NO: 1171 - protein, 12 aa, Artificial
  unknown organism
PGIYYDSTFFTY

SEQ ID NO: 1172 - DNA, 363 bp, Artificial
  unknown organism
gaggtgcagctggtccagtctggagctgaggtgaagaagcctggggcttcagtgaaggtgtcctgcaaggcttctggctacactttcactgcctactatataaactgggtgaggcagacgcctggacagggacttgagtggatggggaggatttatcctggaagtggctttactaactacaatgagaaactcacgggcagggtcacaatgactgctgatgcatccaccaacactgtctacatggagctgagtagcctgagatctgaggacactgctgtctattactgtgcaagaccgggaatctactatgattcaaccttctttacttactggggccaagggaccctggtcaccgtctcctca

SEQ ID NO: 1173 - protein, 107 aa, Artificial
  unknown organism
DIQMTQSPSSLSASVGDSVTITCRASENIYSYLAWYQQKPGKSPKLLIYNAKTLAEGVPSRFSGSGSGTDFSLTISSLQPEDFATYYCQHHYGTPPTFGQGTKLEIK

SEQ ID NO: 1174 - protein, 11 aa, Artificial
  unknown organism
RASENIYSYLA

SEQ ID NO: 1175 - protein, 7 aa, Artificial
  unknown organism
NAKTLAE

SEQ ID NO: 1176 - protein, 9 aa, Artificial
  unknown organism
QHHYGTPPT

SEQ ID NO: 1177 - DNA, 321 bp, Artificial
  unknown organism
gacatccagatgacccagtctccatcctccctatctgcatctgtgggagatagtgtcaccatcacatgtcgagcaagtgagaatatttacagttatttagcatggtatcagcagaaaccgggaaaatctcctaagctcctgatctataatgcaaaaaccttagcagaaggtgtgccatcaaggttcagtggcagtggatcaggcacagatttttctctgacgatcagcagcctgcagcctgaagattttgcgacttattactgtcaacatcattatggtactcctcccacgttcggtcaggggaccaagcttgagatcaaa

SEQ ID NO: 1178 - protein, 243 aa, Artificial
  unknown organism
EVQLVQSGAEVKKPGASVKVSCKASGYTFTAYYINWVRQTPGQGLEWMGRIYPGSGFTNYNEKLTGRVTMTADASTNTVYMELSSLRSEDTAVYYCARPGIYYDSTFFTYWGQGTLVTVSSGGGGSGGGGSGGGGSDIQMTQSPSSLSASVGDSVTITCRASENIYSYLAWYQQKPGKSPKLLIYNAKTLAEGVPSRFSGSGSGTDFSLTISSLQPEDFATYYCQHHYGTPPTFGQGTKLEIK

SEQ ID NO: 1179 - DNA, 729 bp, Artificial
  unknown organism
gaggtgcagctggtccagtctggagctgaggtgaagaagcctggggcttcagtgaaggtgtcctgcaaggcttctggctacactttcactgcctactatataaactgggtgaggcagacgcctggacagggacttgagtggatggggaggatttatcctggaagtggctttactaactacaatgagaaactcacgggcagggtcacaatgactgctgatgcatccaccaacactgtctacatggagctgagtagcctgagatctgaggacactgctgtctattactgtgcaagaccgggaatctactatgattcaaccttctttacttactggggccaagggaccctggtcaccgtctcctcaggtggtggtggttctggcggcggcggctccggtggtggtggttctgacatccagatgacccagtctccatcctccctatctgcatctgtgggagatagtgtcaccatcacatgtcgagcaagtgagaatatttacagttatttagcatggtatcagcagaaaccgggaaaatctcctaagctcctgatctataatgcaaaaaccttagcagaaggtgtgccatcaaggttcagtggcagtggatcaggcacagatttttctctgacgatcagcagcctgcagcctgaagattttgcgacttattactgtcaacatcattatggtactcctcccacgttcggtcaggggaccaagcttgagatcaaa

SEQ ID NO: 1180 - protein, 498 aa, Artificial
  unknown organism
EVQLVQSGAEVKKPGASVKVSCKASGYTFTAYYINWVRQTPGQGLEWMGRIYPGSGFTNYNEKLTGRVTMTADASTNTVYMELSSLRSEDTAVYYCARPGIYYDSTFFTYWGQGTLVTVSSGGGGSGGGGSGGGGSDIQMTQSPSSLSASVGDSVTITCRASENIYSYLAWYQQKPGKSPKLLIYNAKTLAEGVPSRFSGSGSGTDFSLTISSLQPEDFATYYCQHHYGTPPTFGQGTKLEIKSGGGGSEVQLVESGGGLVQPGGSLKLSCAASGFTFNKYAMNWVRQAPGKGLEWVARIRSKYNNYATYYADSVKDRFTISRDDSKNTAYLQMNNLKTEDTAVYYCVRHGNFGNSYISYWAYWGQGTLVTVSSGGGGSGGGGSGGGGSQTVVTQEPSLTVSPGGTVTLTCGSSTGAVTSGNYPNWVQQKPGQAPRGLIGGTKFLAPGTPARFSGSLLGGKAALTLSGVQPEDEAEYYCVLWYSNRWVFGGGTKLTVL

SEQ ID NO: 1181 - DNA, 1494 bp, Artificial
  unknown organism
gaggtgcagctggtccagtctggagctgaggtgaagaagcctggggcttcagtgaaggtgtcctgcaaggcttctggctacactttcactgcctactatataaactgggtgaggcagacgcctggacagggacttgagtggatggggaggatttatcctggaagtggctttactaactacaatgagaaactcacgggcagggtcacaatgactgctgatgcatccaccaacactgtctacatggagctgagtagcctgagatctgaggacactgctgtctattactgtgcaagaccgggaatctactatgattcaaccttctttacttactggggccaagggaccctggtcaccgtctcctcaggtggtggtggttctggcggcggcggctccggtggtggtggttctgacatccagatgacccagtctccatcctccctatctgcatctgtgggagatagtgtcaccatcacatgtcgagcaagtgagaatatttacagttatttagcatggtatcagcagaaaccgggaaaatctcctaagctcctgatctataatgcaaaaaccttagcagaaggtgtgccatcaaggttcagtggcagtggatcaggcacagatttttctctgacgatcagcagcctgcagcctgaagattttgcgacttattactgtcaacatcattatggtactcctcccacgttcggtcaggggaccaagcttgagatcaaatccggaggtggtggatccgaggtgcagctggtcgagtctggaggaggattggtgcagcctggagggtcattgaaactctcatgtgcagcctctggattcaccttcaataagtacgccatgaactgggtccgccaggctccaggaaagggtttggaatgggttgctcgcataagaagtaaatataataattatgcaacatattatgccgattcagtgaaagacaggttcaccatctccagagatgattcaaaaaacactgcctatctacaaatgaacaacttgaaaactgaggacactgccgtgtactactgtgtgagacatgggaacttcggtaatagctacatatcctactgggcttactggggccaagggactctggtcaccgtctcctcaggtggtggtggttctggcggcggcggctccggtggtggtggttctcagactgttgtgactcaggaaccttcactcaccgtatcacctggtggaacagtcacactcacttgtggctcctcgactggggctgttacatctggcaactacccaaactgggtccaacaaaaaccaggtcaggcaccccgtggtctaataggtgggactaagttcctcgcccccggtactcctgccagattctcaggctccctgcttggaggcaaggctgccctcaccctctcaggggtacagccagaggatgaggcagaatattactgtgttctatggtacagcaaccgctgggtgttcggtggaggaaccaaactgactgtccta

SEQ ID NO: 1182 - protein, 121 aa, Artificial
  unknown organism
QVQLVQSGAELKRPGASVKVSCKASGYIFTAYYINWVRQAPGQGLEWIGRIYPGSGFTNYNEKLTGRVTMTADTSTSTAYMELSSLRSEDTAVYYCARPGIYYDSTFFTYWGQGTLVTVSS

SEQ ID NO: 1183 - protein, 5 aa, Artificial
  unknown organism
AYYIN

SEQ ID NO: 1184 - protein, 17 aa, Artificial
  unknown organism
RIYPGSGFTNYNEKLTG

SEQ ID NO: 1185 - protein, 12 aa, Artificial
  unknown organism
PGIYYDSTFFTY

SEQ ID NO: 1186 - DNA, 363 bp, Artificial
  unknown organism
caggtgcagctggtccagtctggagctgagctgaagaggcctggggcttcagtgaaggtgtcctgcaaggcttctggctacattttcactgcctactatataaactgggtgaggcaggcgcctggacagggacttgagtggattgggaggatttatcctggaagtggctttactaactacaatgagaaactcacgggcagggtcacaatgactgctgatacatccaccagcactgcctacatggagctgagtagcctgagatctgaggacactgctgtctattactgtgcaagaccgggaatctactatgattcaaccttctttacttactggggccaagggaccctggtcaccgtctcctca

SEQ ID NO: 1187 - protein, 107 aa, Artificial
  unknown organism
DIQMTQSPSSLSASVGDRVTITCRASENIYSYLAWYQQKPGKAPKLLIYNAKTLAEGVPSRFSGSGSGTHFTLTISSLQPEDFATYYCQHHYGTPPTFGQGTKLEIK

SEQ ID NO: 1188 - protein, 11 aa, Artificial
  unknown organism
RASENIYSYLA

SEQ ID NO: 1189 - protein, 7 aa, Artificial
  unknown organism
NAKTLAE

SEQ ID NO: 1190 - protein, 9 aa, Artificial
  unknown organism
QHHYGTPPT

SEQ ID NO: 1191 - DNA, 321 bp, Artificial
  unknown organism
gacatccagatgacccagtctccatcctccctatctgcatctgtgggagatagagtcaccatcacatgtcgagcaagtgagaatatttacagttatttagcatggtatcagcagaaaccgggaaaagctcctaagctcctgatctataatgcaaaaaccttagcagaaggtgtgccatcaaggttcagtggcagtggatcaggcacacattttactctgacgatcagcagcctgcagcctgaagattttgcgacttattactgtcaacatcattatggtactcctcccacgttcggtcaggggaccaagcttgagatcaaa

SEQ ID NO: 1192 - protein, 243 aa, Artificial
  unknown organism
QVQLVQSGAELKRPGASVKVSCKASGYIFTAYYINWVRQAPGQGLEWIGRIYPGSGFTNYNEKLTGRVTMTADTSTSTAYMELSSLRSEDTAVYYCARPGIYYDSTFFTYWGQGTLVTVSSGGGGSGGGGSGGGGSDIQMTQSPSSLSASVGDRVTITCRASENIYSYLAWYQQKPGKAPKLLIYNAKTLAEGVPSRFSGSGSGTHFTLTISSLQPEDFATYYCQHHYGTPPTFGQGTKLEIK

SEQ ID NO: 1193 - DNA, 729 bp, Artificial
  unknown organism
caggtgcagctggtccagtctggagctgagctgaagaggcctggggcttcagtgaaggtgtcctgcaaggcttctggctacattttcactgcctactatataaactgggtgaggcaggcgcctggacagggacttgagtggattgggaggatttatcctggaagtggctttactaactacaatgagaaactcacgggcagggtcacaatgactgctgatacatccaccagcactgcctacatggagctgagtagcctgagatctgaggacactgctgtctattactgtgcaagaccgggaatctactatgattcaaccttctttacttactggggccaagggaccctggtcaccgtctcctcaggtggtggtggttctggcggcggcggctccggtggtggtggttctgacatccagatgacccagtctccatcctccctatctgcatctgtgggagatagagtcaccatcacatgtcgagcaagtgagaatatttacagttatttagcatggtatcagcagaaaccgggaaaagctcctaagctcctgatctataatgcaaaaaccttagcagaaggtgtgccatcaaggttcagtggcagtggatcaggcacacattttactctgacgatcagcagcctgcagcctgaagattttgcgacttattactgtcaacatcattatggtactcctcccacgttcggtcaggggaccaagcttgagatcaaa

SEQ ID NO: 1194 - protein, 498 aa, Artificial
  unknown organism
QVQLVQSGAELKRPGASVKVSCKASGYIFTAYYINWVRQAPGQGLEWIGRIYPGSGFTNYNEKLTGRVTMTADTSTSTAYMELSSLRSEDTAVYYCARPGIYYDSTFFTYWGQGTLVTVSSGGGGSGGGGSGGGGSDIQMTQSPSSLSASVGDRVTITCRASENIYSYLAWYQQKPGKAPKLLIYNAKTLAEGVPSRFSGSGSGTHFTLTISSLQPEDFATYYCQHHYGTPPTFGQGTKLEIKSGGGGSEVQLVESGGGLVQPGGSLKLSCAASGFTFNKYAMNWVRQAPGKGLEWVARIRSKYNNYATYYADSVKDRFTISRDDSKNTAYLQMNNLKTEDTAVYYCVRHGNFGNSYISYWAYWGQGTLVTVSSGGGGSGGGGSGGGGSQTVVTQEPSLTVSPGGTVTLTCGSSTGAVTSGNYPNWVQQKPGQAPRGLIGGTKFLAPGTPARFSGSLLGGKAALTLSGVQPEDEAEYYCVLWYSNRWVFGGGTKLTVL

SEQ ID NO: 1195 - DNA, 1494 bp, Artificial
  unknown organism
caggtgcagctggtccagtctggagctgagctgaagaggcctggggcttcagtgaaggtgtcctgcaaggcttctggctacattttcactgcctactatataaactgggtgaggcaggcgcctggacagggacttgagtggattgggaggatttatcctggaagtggctttactaactacaatgagaaactcacgggcagggtcacaatgactgctgatacatccaccagcactgcctacatggagctgagtagcctgagatctgaggacactgctgtctattactgtgcaagaccgggaatctactatgattcaaccttctttacttactggggccaagggaccctggtcaccgtctcctcaggtggtggtggttctggcggcggcggctccggtggtggtggttctgacatccagatgacccagtctccatcctccctatctgcatctgtgggagatagagtcaccatcacatgtcgagcaagtgagaatatttacagttatttagcatggtatcagcagaaaccgggaaaagctcctaagctcctgatctataatgcaaaaaccttagcagaaggtgtgccatcaaggttcagtggcagtggatcaggcacacattttactctgacgatcagcagcctgcagcctgaagattttgcgacttattactgtcaacatcattatggtactcctcccacgttcggtcaggggaccaagcttgagatcaaatccggaggtggtggatccgaggtgcagctggtcgagtctggaggaggattggtgcagcctggagggtcattgaaactctcatgtgcagcctctggattcaccttcaataagtacgccatgaactgggtccgccaggctccaggaaagggtttggaatgggttgctcgcataagaagtaaatataataattatgcaacatattatgccgattcagtgaaagacaggttcaccatctccagagatgattcaaaaaacactgcctatctacaaatgaacaacttgaaaactgaggacactgccgtgtactactgtgtgagacatgggaacttcggtaatagctacatatcctactgggcttactggggccaagggactctggtcaccgtctcctcaggtggtggtggttctggcggcggcggctccggtggtggtggttctcagactgttgtgactcaggaaccttcactcaccgtatcacctggtggaacagtcacactcacttgtggctcctcgactggggctgttacatctggcaactacccaaactgggtccaacaaaaaccaggtcaggcaccccgtggtctaataggtgggactaagttcctcgcccccggtactcctgccagattctcaggctccctgcttggaggcaaggctgccctcaccctctcaggggtacagccagaggatgaggcagaatattactgtgttctatggtacagcaaccgctgggtgttcggtggaggaaccaaactgactgtccta

SEQ ID NO: 1196 - protein, 121 aa, Artificial
  unknown organism
EVQLVQSGAEVMKPGASVKVSCKASGYTFTAYYINWVRQTPGQGLEWIGRIYPGSGFTNYNEKLTGRVTLTADTSTNTVYMELSSLRSEDTAVYYCARPGIYYDSTFFTYWGQGTLVTVSS

SEQ ID NO: 1197 - protein, 5 aa, Artificial
  unknown organism
AYYIN

SEQ ID NO: 1198 - protein, 17 aa, Artificial
  unknown organism
RIYPGSGFTNYNEKLTG

SEQ ID NO: 1199 - protein, 12 aa, Artificial
  unknown organism
PGIYYDSTFFTY

SEQ ID NO: 1200 - DNA, 363 bp, Artificial
  unknown organism
gaggtgcagctggtccagtctggagctgaggtgatgaagcctggggcttcagtgaaggtgtcctgcaaggcttctggctacactttcactgcctactatataaactgggtgaggcagacgcctggacagggacttgagtggattgggaggatttatcctggaagtggctttactaactacaatgagaaactcacgggcagggtcacactgactgctgatacatccaccaacactgtctacatggagctgagtagcctgagatctgaggacactgctgtctattactgtgcaagaccgggaatctactatgattcaaccttctttacttactggggccaagggaccctggtcaccgtctcctca

SEQ ID NO: 1201 - protein, 107 aa, Artificial
  unknown organism
DIQMTQSPSSLSASVGDRVTITCRASENIYSYLAWYQQKPGKAPKLLIYNAKTLAEGVPSRFSGSGSGTDFTLTISSLQPEDFATYYCQHHYGTPPTYGQGTKLEIK

SEQ ID NO: 1202 - protein, 11 aa, Artificial
  unknown organism
RASENIYSYLA

SEQ ID NO: 1203 - protein, 7 aa, Artificial
  unknown organism
NAKTLAE

SEQ ID NO: 1204 - protein, 9 aa, Artificial
  unknown organism
QHHYGTPPT

SEQ ID NO: 1205 - DNA, 321 bp, Artificial
  unknown organism
gacatccagatgacccagtctccatcctccctatctgcatctgtgggagatagagtcaccatcacatgtcgagcaagtgagaatatttacagttatttagcatggtatcagcagaaaccgggaaaagctcctaagctcctgatctataatgcaaaaaccttagcagaaggtgtgccatcaaggttcagtggcagtggatcaggcacagattttactctgacgatcagcagcctgcagcctgaagattttgcgacttattactgtcaacatcattatggtactcctcccacgtacggtcaggggaccaagcttgagatcaaa

SEQ ID NO: 1206 - protein, 243 aa, Artificial
  unknown organism
EVQLVQSGAEVMKPGASVKVSCKASGYTFTAYYINWVRQTPGQGLEWIGRIYPGSGFTNYNEKLTGRVTLTADTSTNTVYMELSSLRSEDTAVYYCARPGIYYDSTFFTYWGQGTLVTVSSGGGGSGGGGSGGGGSDIQMTQSPSSLSASVGDRVTITCRASENIYSYLAWYQQKPGKAPKLLIYNAKTLAEGVPSRFSGSGSGTDFTLTISSLQPEDFATYYCQHHYGTPPTYGQGTKLEIK

SEQ ID NO: 1207 - DNA, 729 bp, Artificial
  unknown organism
gaggtgcagctggtccagtctggagctgaggtgatgaagcctggggcttcagtgaaggtgtcctgcaaggcttctggctacactttcactgcctactatataaactgggtgaggcagacgcctggacagggacttgagtggattgggaggatttatcctggaagtggctttactaactacaatgagaaactcacgggcagggtcacactgactgctgatacatccaccaacactgtctacatggagctgagtagcctgagatctgaggacactgctgtctattactgtgcaagaccgggaatctactatgattcaaccttctttacttactggggccaagggaccctggtcaccgtctcctcaggtggtggtggttctggcggcggcggctccggtggtggtggttctgacatccagatgacccagtctccatcctccctatctgcatctgtgggagatagagtcaccatcacatgtcgagcaagtgagaatatttacagttatttagcatggtatcagcagaaaccgggaaaagctcctaagctcctgatctataatgcaaaaaccttagcagaaggtgtgccatcaaggttcagtggcagtggatcaggcacagattttactctgacgatcagcagcctgcagcctgaagattttgcgacttattactgtcaacatcattatggtactcctcccacgtacggtcaggggaccaagcttgagatcaaa

SEQ ID NO: 1208 - protein, 498 aa, Artificial
  unknown organism
EVQLVQSGAEVMKPGASVKVSCKASGYTFTAYYINWVRQTPGQGLEWIGRIYPGSGFTNYNEKLTGRVTLTADTSTNTVYMELSSLRSEDTAVYYCARPGIYYDSTFFTYWGQGTLVTVSSGGGGSGGGGSGGGGSDIQMTQSPSSLSASVGDRVTITCRASENIYSYLAWYQQKPGKAPKLLIYNAKTLAEGVPSRFSGSGSGTDFTLTISSLQPEDFATYYCQHHYGTPPTYGQGTKLEIKSGGGGSEVQLVESGGGLVQPGGSLKLSCAASGFTFNKYAMNWVRQAPGKGLEWVARIRSKYNNYATYYADSVKDRFTISRDDSKNTAYLQMNNLKTEDTAVYYCVRHGNFGNSYISYWAYWGQGTLVTVSSGGGGSGGGGSGGGGSQTVVTQEPSLTVSPGGTVTLTCGSSTGAVTSGNYPNWVQQKPGQAPRGLIGGTKFLAPGTPARFSGSLLGGKAALTLSGVQPEDEAEYYCVLWYSNRWVFGGGTKLTVL

SEQ ID NO: 1209 - DNA, 1494 bp, Artificial
  unknown organism
gaggtgcagctggtccagtctggagctgaggtgatgaagcctggggcttcagtgaaggtgtcctgcaaggcttctggctacactttcactgcctactatataaactgggtgaggcagacgcctggacagggacttgagtggattgggaggatttatcctggaagtggctttactaactacaatgagaaactcacgggcagggtcacactgactgctgatacatccaccaacactgtctacatggagctgagtagcctgagatctgaggacactgctgtctattactgtgcaagaccgggaatctactatgattcaaccttctttacttactggggccaagggaccctggtcaccgtctcctcaggtggtggtggttctggcggcggcggctccggtggtggtggttctgacatccagatgacccagtctccatcctccctatctgcatctgtgggagatagagtcaccatcacatgtcgagcaagtgagaatatttacagttatttagcatggtatcagcagaaaccgggaaaagctcctaagctcctgatctataatgcaaaaaccttagcagaaggtgtgccatcaaggttcagtggcagtggatcaggcacagattttactctgacgatcagcagcctgcagcctgaagattttgcgacttattactgtcaacatcattatggtactcctcccacgtacggtcaggggaccaagcttgagatcaaatccggaggtggtggatccgaggtgcagctggtcgagtctggaggaggattggtgcagcctggagggtcattgaaactctcatgtgcagcctctggattcaccttcaataagtacgccatgaactgggtccgccaggctccaggaaagggtttggaatgggttgctcgcataagaagtaaatataataattatgcaacatattatgccgattcagtgaaagacaggttcaccatctccagagatgattcaaaaaacactgcctatctacaaatgaacaacttgaaaactgaggacactgccgtgtactactgtgtgagacatgggaacttcggtaatagctacatatcctactgggcttactggggccaagggactctggtcaccgtctcctcaggtggtggtggttctggcggcggcggctccggtggtggtggttctcagactgttgtgactcaggaaccttcactcaccgtatcacctggtggaacagtcacactcacttgtggctcctcgactggggctgttacatctggcaactacccaaactgggtccaacaaaaaccaggtcaggcaccccgtggtctaataggtgggactaagttcctcgcccccggtactcctgccagattctcaggctccctgcttggaggcaaggctgccctcaccctctcaggggtacagccagaggatgaggcagaatattactgtgttctatggtacagcaaccgctgggtgttcggtggaggaaccaaactgactgtccta

SEQ ID NO: 1210 - protein, 121 aa, Artificial
  unknown organism
EVQLVQSGAEVKKPGASVKVSCKASGYTFTAYYINWVRQAPGQGLEWIGRIYPGSGFTNYNEKLTGRVTMTGDTSSSTVYMELSSLTSEDTAVYYCARPGIYYDSTFFTYWGQGTLVTVSS

SEQ ID NO: 1211 - protein, 5 aa, Artificial
  unknown organism
AYYIN

SEQ ID NO: 1212 - protein, 17 aa, Artificial
  unknown organism
RIYPGSGFTNYNEKLTG

SEQ ID NO: 1213 - protein, 12 aa, Artificial
  unknown organism
PGIYYDSTFFTY

SEQ ID NO: 1214 - DNA, 363 bp, Artificial
  unknown organism
gaggtgcagctggtccagtctggagctgaggtgaagaagcctggggcttcagtgaaggtgtcctgcaaggcttctggctacactttcactgcctactatataaactgggtgaggcaggcgcctgggcagggacttgagtggattgggaggatttatcctggaagtggctttactaactacaatgagaaactcacgggcagggtcacaatgactggtgatacatcctccagcactgtctacatggagctgagtagcctgacatctgaggacactgctgtctattactgtgcaagaccgggaatctactatgattcaaccttctttacttactggggccaagggaccctggtcaccgtctcctca

SEQ ID NO: 1215 - protein, 107 aa, Artificial
  unknown organism
DIQMTQSPSSLSASVGDTVTITCRASENIYSYLAWYQQKPGKSPQLLIYNAKTLAEGVPSRFSGSGSGTDFTLTISSLQPEDFASYYCQHHYGTPPTFGQGTKLEIK

SEQ ID NO: 1216 - protein, 11 aa, Artificial
  unknown organism
RASENIYSYLA

SEQ ID NO: 1217 - protein, 7 aa, Artificial
  unknown organism
NAKTLAE

SEQ ID NO: 1218 - protein, 9 aa, Artificial
  unknown organism
QHHYGTPPT

SEQ ID NO: 1219 - DNA, 321 bp, Artificial
  unknown organism
gacatccagatgacccagtctccatcctccctatctgcatctgtgggagatacagtcaccatcacatgtcgagcaagtgagaatatttacagttatttagcatggtatcagcagaaaccgggaaaatctcctcagctcctgatctataatgcaaaaaccttagcagaaggtgtgccatcaaggttcagtggtagtggatcaggcacagattttactctgacgatcagcagcctgcagcctgaagattttgcgagttattactgtcaacatcattatggtactcctcccacgttcggtcaggggaccaagcttgagatcaaa

SEQ ID NO: 1220 - protein, 243 aa, Artificial
  unknown organism
EVQLVQSGAEVKKPGASVKVSCKASGYTFTAYYINWVRQAPGQGLEWIGRIYPGSGFTNYNEKLTGRVTMTGDTSSSTVYMELSSLTSEDTAVYYCARPGIYYDSTFFTYWGQGTLVTVSSGGGGSGGGGSGGGGSDIQMTQSPSSLSASVGDTVTITCRASENIYSYLAWYQQKPGKSPQLLIYNAKTLAEGVPSRFSGSGSGTDFTLTISSLQPEDFASYYCQHHYGTPPTFGQGTKLEIK

SEQ ID NO: 1221 - DNA, 729 bp, Artificial
  unknown organism
gaggtgcagctggtccagtctggagctgaggtgaagaagcctggggcttcagtgaaggtgtcctgcaaggcttctggctacactttcactgcctactatataaactgggtgaggcaggcgcctgggcagggacttgagtggattgggaggatttatcctggaagtggctttactaactacaatgagaaactcacgggcagggtcacaatgactggtgatacatcctccagcactgtctacatggagctgagtagcctgacatctgaggacactgctgtctattactgtgcaagaccgggaatctactatgattcaaccttctttacttactggggccaagggaccctggtcaccgtctcctcaggtggtggtggttctggcggcggcggctccggtggtggtggttctgacatccagatgacccagtctccatcctccctatctgcatctgtgggagatacagtcaccatcacatgtcgagcaagtgagaatatttacagttatttagcatggtatcagcagaaaccgggaaaatctcctcagctcctgatctataatgcaaaaaccttagcagaaggtgtgccatcaaggttcagtggtagtggatcaggcacagattttactctgacgatcagcagcctgcagcctgaagattttgcgagttattactgtcaacatcattatggtactcctcccacgttcggtcaggggaccaagcttgagatcaaa

SEQ ID NO: 1222 - protein, 498 aa, Artificial
  unknown organism
EVQLVQSGAEVKKPGASVKVSCKASGYTFTAYYINWVRQAPGQGLEWIGRIYPGSGFTNYNEKLTGRVTMTGDTSSSTVYMELSSLTSEDTAVYYCARPGIYYDSTFFTYWGQGTLVTVSSGGGGSGGGGSGGGGSDIQMTQSPSSLSASVGDTVTITCRASENIYSYLAWYQQKPGKSPQLLIYNAKTLAEGVPSRFSGSGSGTDFTLTISSLQPEDFASYYCQHHYGTPPTFGQGTKLEIKSGGGGSEVQLVESGGGLVQPGGSLKLSCAASGFTFNKYAMNWVRQAPGKGLEWVARIRSKYNNYATYYADSVKDRFTISRDDSKNTAYLQMNNLKTEDTAVYYCVRHGNFGNSYISYWAYWGQGTLVTVSSGGGGSGGGGSGGGGSQTVVTQEPSLTVSPGGTVTLTCGSSTGAVTSGNYPNWVQQKPGQAPRGLIGGTKFLAPGTPARFSGSLLGGKAALTLSGVQPEDEAEYYCVLWYSNRWVFGGGTKLTVL

SEQ ID NO: 1223 - DNA, 1494 bp, Artificial
  unknown organism
gaggtgcagctggtccagtctggagctgaggtgaagaagcctggggcttcagtgaaggtgtcctgcaaggcttctggctacactttcactgcctactatataaactgggtgaggcaggcgcctgggcagggacttgagtggattgggaggatttatcctggaagtggctttactaactacaatgagaaactcacgggcagggtcacaatgactggtgatacatcctccagcactgtctacatggagctgagtagcctgacatctgaggacactgctgtctattactgtgcaagaccgggaatctactatgattcaaccttctttacttactggggccaagggaccctggtcaccgtctcctcaggtggtggtggttctggcggcggcggctccggtggtggtggttctgacatccagatgacccagtctccatcctccctatctgcatctgtgggagatacagtcaccatcacatgtcgagcaagtgagaatatttacagttatttagcatggtatcagcagaaaccgggaaaatctcctcagctcctgatctataatgcaaaaaccttagcagaaggtgtgccatcaaggttcagtggtagtggatcaggcacagattttactctgacgatcagcagcctgcagcctgaagattttgcgagttattactgtcaacatcattatggtactcctcccacgttcggtcaggggaccaagcttgagatcaaatccggaggtggtggatccgaggtgcagctggtcgagtctggaggaggattggtgcagcctggagggtcattgaaactctcatgtgcagcctctggattcaccttcaataagtacgccatgaactgggtccgccaggctccaggaaagggtttggaatgggttgctcgcataagaagtaaatataataattatgcaacatattatgccgattcagtgaaagacaggttcaccatctccagagatgattcaaaaaacactgcctatctacaaatgaacaacttgaaaactgaggacactgccgtgtactactgtgtgagacatgggaacttcggtaatagctacatatcctactgggcttactggggccaagggactctggtcaccgtctcctcaggtggtggtggttctggcggcggcggctccggtggtggtggttctcagactgttgtgactcaggaaccttcactcaccgtatcacctggtggaacagtcacactcacttgtggctcctcgactggggctgttacatctggcaactacccaaactgggtccaacaaaaaccaggtcaggcaccccgtggtctaataggtgggactaagttcctcgcccccggtactcctgccagattctcaggctccctgcttggaggcaaggctgccctcaccctctcaggggtacagccagaggatgaggcagaatattactgtgttctatggtacagcaaccgctgggtgttcggtggaggaaccaaactgactgtccta

SEQ ID NO: 1224 - protein, 121 aa, Artificial
  unknown organism
EVQLVQSGAEVMKPGASVKVSCKASGYTFTAYYINWVRQAPGQGLEWMGRIYPGSGFTNYNEKLTGRVTMTADTSTNTVYMELSSLRSEDTAVYYCARPGIYYDSTFFTYWGQGTLVTVSS

SEQ ID NO: 1225 - protein, 5 aa, Artificial
  unknown organism
AYYIN

SEQ ID NO: 1226 - protein, 17 aa, Artificial
  unknown organism
RIYPGSGFTNYNEKLTG

SEQ ID NO: 1227 - protein, 12 aa, Artificial
  unknown organism
PGIYYDSTFFTY

SEQ ID NO: 1228 - DNA, 363 bp, Artificial
  unknown organism
gaggtgcagctggtccagtctggagctgaggtgatgaagcctggggcttcagtgaaggtgtcctgcaaggcttctggctacactttcactgcctactatataaactgggtgaggcaggcgcctggacagggacttgagtggatggggaggatttatcctggaagtggctttactaactacaatgagaaactcacgggcagggtcacaatgactgctgatacatccaccaacactgtctacatggagctgagtagcctgagatctgaggacactgctgtctattactgtgcaagaccgggaatctactatgattcaaccttctttacttactggggccaagggaccctggtcaccgtctcctca

SEQ ID NO: 1229 - protein, 107 aa, Artificial
  unknown organism
DIQMTQSPSSLSASVGDTVTITCRASENIYSYLAWYQQKPGKAPKLLIYNAKTLAEGVPSRFSGSGSGTDFTLTISSLQPEDFATYYCQHHYGTPPTFGQGTKLEIK

SEQ ID NO: 1230 - protein, 11 aa, Artificial
  unknown organism
RASENIYSYLA

SEQ ID NO: 1231 - protein, 7 aa, Artificial
  unknown organism
NAKTLAE

SEQ ID NO: 1232 - protein, 9 aa, Artificial
  unknown organism
QHHYGTPPT

SEQ ID NO: 1233 - DNA, 321 bp, Artificial
  unknown organism
gacatccagatgacccagtctccatcctccctatctgcatctgtgggagatacagtcaccatcacatgtcgagcaagtgagaatatttacagttatttagcatggtatcagcagaaaccgggaaaagctcctaagctcctgatctataatgcaaaaaccttagcagaaggtgtgccatcaaggttcagtggcagtggatcaggcacagattttactctgacgatcagcagcctgcagcctgaagattttgcgacttattactgtcaacatcattatggtactcctcccacgttcggtcaggggaccaagcttgagatcaaa

SEQ ID NO: 1234 - protein, 243 aa, Artificial
  unknown organism
EVQLVQSGAEVMKPGASVKVSCKASGYTFTAYYINWVRQAPGQGLEWMGRIYPGSGFTNYNEKLTGRVTMTADTSTNTVYMELSSLRSEDTAVYYCARPGIYYDSTFFTYWGQGTLVTVSSGGGGSGGGGSGGGGSDIQMTQSPSSLSASVGDTVTITCRASENIYSYLAWYQQKPGKAPKLLIYNAKTLAEGVPSRFSGSGSGTDFTLTISSLQPEDFATYYCQHHYGTPPTFGQGTKLEIK

SEQ ID NO: 1235 - DNA, 729 bp, Artificial
  unknown organism
gaggtgcagctggtccagtctggagctgaggtgatgaagcctggggcttcagtgaaggtgtcctgcaaggcttctggctacactttcactgcctactatataaactgggtgaggcaggcgcctggacagggacttgagtggatggggaggatttatcctggaagtggctttactaactacaatgagaaactcacgggcagggtcacaatgactgctgatacatccaccaacactgtctacatggagctgagtagcctgagatctgaggacactgctgtctattactgtgcaagaccgggaatctactatgattcaaccttctttacttactggggccaagggaccctggtcaccgtctcctcaggtggtggtggttctggcggcggcggctccggtggtggtggttctgacatccagatgacccagtctccatcctccctatctgcatctgtgggagatacagtcaccatcacatgtcgagcaagtgagaatatttacagttatttagcatggtatcagcagaaaccgggaaaagctcctaagctcctgatctataatgcaaaaaccttagcagaaggtgtgccatcaaggttcagtggcagtggatcaggcacagattttactctgacgatcagcagcctgcagcctgaagattttgcgacttattactgtcaacatcattatggtactcctcccacgttcggtcaggggaccaagcttgagatcaaa

SEQ ID NO: 1236 - protein, 498 aa, Artificial
  unknown organism
EVQLVQSGAEVMKPGASVKVSCKASGYTFTAYYINWVRQAPGQGLEWMGRIYPGSGFTNYNEKLTGRVTMTADTSTNTVYMELSSLRSEDTAVYYCARPGIYYDSTFFTYWGQGTLVTVSSGGGGSGGGGSGGGGSDIQMTQSPSSLSASVGDTVTITCRASENIYSYLAWYQQKPGKAPKLLIYNAKTLAEGVPSRFSGSGSGTDFTLTISSLQPEDFATYYCQHHYGTPPTFGQGTKLEIKSGGGGSEVQLVESGGGLVQPGGSLKLSCAASGFTFNKYAMNWVRQAPGKGLEWVARIRSKYNNYATYYADSVKDRFTISRDDSKNTAYLQMNNLKTEDTAVYYCVRHGNFGNSYISYWAYWGQGTLVTVSSGGGGSGGGGSGGGGSQTVVTQEPSLTVSPGGTVTLTCGSSTGAVTSGNYPNWVQQKPGQAPRGLIGGTKFLAPGTPARFSGSLLGGKAALTLSGVQPEDEAEYYCVLWYSNRWVFGGGTKLTVL

SEQ ID NO: 1237 - DNA, 1494 bp, Artificial
  unknown organism
gaggtgcagctggtccagtctggagctgaggtgatgaagcctggggcttcagtgaaggtgtcctgcaaggcttctggctacactttcactgcctactatataaactgggtgaggcaggcgcctggacagggacttgagtggatggggaggatttatcctggaagtggctttactaactacaatgagaaactcacgggcagggtcacaatgactgctgatacatccaccaacactgtctacatggagctgagtagcctgagatctgaggacactgctgtctattactgtgcaagaccgggaatctactatgattcaaccttctttacttactggggccaagggaccctggtcaccgtctcctcaggtggtggtggttctggcggcggcggctccggtggtggtggttctgacatccagatgacccagtctccatcctccctatctgcatctgtgggagatacagtcaccatcacatgtcgagcaagtgagaatatttacagttatttagcatggtatcagcagaaaccgggaaaagctcctaagctcctgatctataatgcaaaaaccttagcagaaggtgtgccatcaaggttcagtggcagtggatcaggcacagattttactctgacgatcagcagcctgcagcctgaagattttgcgacttattactgtcaacatcattatggtactcctcccacgttcggtcaggggaccaagcttgagatcaaatccggaggtggtggatccgaggtgcagctggtcgagtctggaggaggattggtgcagcctggagggtcattgaaactctcatgtgcagcctctggattcaccttcaataagtacgccatgaactgggtccgccaggctccaggaaagggtttggaatgggttgctcgcataagaagtaaatataataattatgcaacatattatgccgattcagtgaaagacaggttcaccatctccagagatgattcaaaaaacactgcctatctacaaatgaacaacttgaaaactgaggacactgccgtgtactactgtgtgagacatgggaacttcggtaatagctacatatcctactgggcttactggggccaagggactctggtcaccgtctcctcaggtggtggtggttctggcggcggcggctccggtggtggtggttctcagactgttgtgactcaggaaccttcactcaccgtatcacctggtggaacagtcacactcacttgtggctcctcgactggggctgttacatctggcaactacccaaactgggtccaacaaaaaccaggtcaggcaccccgtggtctaataggtgggactaagttcctcgcccccggtactcctgccagattctcaggctccctgcttggaggcaaggctgccctcaccctctcaggggtacagccagaggatgaggcagaatattactgtgttctatggtacagcaaccgctgggtgttcggtggaggaaccaaactgactgtccta

SEQ ID NO: 1238 - protein, 121 aa, Artificial
  unknown organism
EVQLVQSGAEVKKPGASVKLSCKASGYTFTAYYINWVRQAPGQGLEWIGRIYPGSGFTNYNEKLTGRVTMTADTSTSTVYMELSSLRSEDTAVYYCARPGIYYDSTFFTYWGQGTLVTVSS

SEQ ID NO: 1239 - protein, 5 aa, Artificial
  unknown organism
AYYIN

SEQ ID NO: 1240 - protein, 17 aa, Artificial
  unknown organism
RIYPGSGFTNYNEKLTG

SEQ ID NO: 1241 - protein, 12 aa, Artificial
  unknown organism
PGIYYDSTFFTY

SEQ ID NO: 1242 - DNA, 363 bp, Artificial
  unknown organism
gaggtgcagctggtccagtctggagctgaggtgaagaagcctggggcttcagtgaagctgtcctgcaaggcttctggctacactttcactgcctattatataaactgggtgaggcaggcgcctggacagggacttgagtggattgggaggatttatcctggaagtggctttactaactacaatgagaaactcacgggcagggtcacaatgactgctgatacatccaccagcactgtctacatggagctgagtagcctgagatctgaggacactgctgtctattactgtgcaagaccgggaatctactatgattcaaccttctttacttactggggccaagggaccctggtcaccgtctcctca

SEQ ID NO: 1243 - protein, 107 aa, Artificial
  unknown organism
DIQMTQSPSSLSASVGDSVTITCRASENIYSYLAWYQQKPGKAPQLLIYNAKTLAEGVPSRFSGSGSGTDFTLKISSLQPEDFASYYCQHHYGTPPTFGQGTKLEIK

SEQ ID NO: 1244 - protein, 11 aa, Artificial
  unknown organism
RASENIYSYLA

SEQ ID NO: 1245 - protein, 7 aa, Artificial
  unknown organism
NAKTLAE

SEQ ID NO: 1246 - protein, 9 aa, Artificial
  unknown organism
QHHYGTPPT

SEQ ID NO: 1247 - DNA, 321 bp, Artificial
  unknown organism
gacatccagatgacccagtctccatcctccctatctgcatctgtgggagatagtgtgaccatcacatgtcgagcaagtgagaatatttacagttatttagcatggtatcagcagaaaccgggaaaagctcctcagctcctgatctataatgcaaaaaccttagcagaaggtgtgccatcaaggttcagtggcagtggatcaggcacagattttactctgaagatcagcagcctgcagcctgaagattttgcgagttattactgtcaacatcattatggtactcctcccacgttcggtcaggggaccaagcttgagatcaaa

SEQ ID NO: 1248 - protein, 243 aa, Artificial
  unknown organism
EVQLVQSGAEVKKPGASVKLSCKASGYTFTAYYINWVRQAPGQGLEWIGRIYPGSGFTNYNEKLTGRVTMTADTSTSTVYMELSSLRSEDTAVYYCARPGIYYDSTFFTYWGQGTLVTVSSGGGGSGGGGSGGGGSDIQMTQSPSSLSASVGDSVTITCRASENIYSYLAWYQQKPGKAPQLLIYNAKTLAEGVPSRFSGSGSGTDFTLKISSLQPEDFASYYCQHHYGTPPTFGQGTKLEIK

SEQ ID NO: 1249 - DNA, 729 bp, Artificial
  unknown organism
gaggtgcagctggtccagtctggagctgaggtgaagaagcctggggcttcagtgaagctgtcctgcaaggcttctggctacactttcactgcctattatataaactgggtgaggcaggcgcctggacagggacttgagtggattgggaggatttatcctggaagtggctttactaactacaatgagaaactcacgggcagggtcacaatgactgctgatacatccaccagcactgtctacatggagctgagtagcctgagatctgaggacactgctgtctattactgtgcaagaccgggaatctactatgattcaaccttctttacttactggggccaagggaccctggtcaccgtctcctcaggtggtggtggttctggcggcggcggctccggtggtggtggttctgacatccagatgacccagtctccatcctccctatctgcatctgtgggagatagtgtgaccatcacatgtcgagcaagtgagaatatttacagttatttagcatggtatcagcagaaaccgggaaaagctcctcagctcctgatctataatgcaaaaaccttagcagaaggtgtgccatcaaggttcagtggcagtggatcaggcacagattttactctgaagatcagcagcctgcagcctgaagattttgcgagttattactgtcaacatcattatggtactcctcccacgttcggtcaggggaccaagcttgagatcaaa

SEQ ID NO: 1250 - protein, 498 aa, Artificial
  unknown organism
EVQLVQSGAEVKKPGASVKLSCKASGYTFTAYYINWVRQAPGQGLEWIGRIYPGSGFTNYNEKLTGRVTMTADTSTSTVYMELSSLRSEDTAVYYCARPGIYYDSTFFTYWGQGTLVTVSSGGGGSGGGGSGGGGSDIQMTQSPSSLSASVGDSVTITCRASENIYSYLAWYQQKPGKAPQLLIYNAKTLAEGVPSRFSGSGSGTDFTLKISSLQPEDFASYYCQHHYGTPPTFGQGTKLEIKSGGGGSEVQLVESGGGLVQPGGSLKLSCAASGFTFNKYAMNWVRQAPGKGLEWVARIRSKYNNYATYYADSVKDRFTISRDDSKNTAYLQMNNLKTEDTAVYYCVRHGNFGNSYISYWAYWGQGTLVTVSSGGGGSGGGGSGGGGSQTVVTQEPSLTVSPGGTVTLTCGSSTGAVTSGNYPNWVQQKPGQAPRGLIGGTKFLAPGTPARFSGSLLGGKAALTLSGVQPEDEAEYYCVLWYSNRWVFGGGTKLTVL

SEQ ID NO: 1251 - DNA, 1494 bp, Artificial
  unknown organism
gaggtgcagctggtccagtctggagctgaggtgaagaagcctggggcttcagtgaagctgtcctgcaaggcttctggctacactttcactgcctattatataaactgggtgaggcaggcgcctggacagggacttgagtggattgggaggatttatcctggaagtggctttactaactacaatgagaaactcacgggcagggtcacaatgactgctgatacatccaccagcactgtctacatggagctgagtagcctgagatctgaggacactgctgtctattactgtgcaagaccgggaatctactatgattcaaccttctttacttactggggccaagggaccctggtcaccgtctcctcaggtggtggtggttctggcggcggcggctccggtggtggtggttctgacatccagatgacccagtctccatcctccctatctgcatctgtgggagatagtgtgaccatcacatgtcgagcaagtgagaatatttacagttatttagcatggtatcagcagaaaccgggaaaagctcctcagctcctgatctataatgcaaaaaccttagcagaaggtgtgccatcaaggttcagtggcagtggatcaggcacagattttactctgaagatcagcagcctgcagcctgaagattttgcgagttattactgtcaacatcattatggtactcctcccacgttcggtcaggggaccaagcttgagatcaaatccggaggtggtggatccgaggtgcagctggtcgagtctggaggaggattggtgcagcctggagggtcattgaaactctcatgtgcagcctctggattcaccttcaataagtacgccatgaactgggtccgccaggctccaggaaagggtttggaatgggttgctcgcataagaagtaaatataataattatgcaacatattatgccgattcagtgaaagacaggttcaccatctccagagatgattcaaaaaacactgcctatctacaaatgaacaacttgaaaactgaggacactgccgtgtactactgtgtgagacatgggaacttcggtaatagctacatatcctactgggcttactggggccaagggactctggtcaccgtctcctcaggtggtggtggttctggcggcggcggctccggtggtggtggttctcagactgttgtgactcaggaaccttcactcaccgtatcacctggtggaacagtcacactcacttgtggctcctcgactggggctgttacatctggcaactacccaaactgggtccaacaaaaaccaggtcaggcaccccgtggtctaataggtgggactaagttcctcgcccccggtactcctgccagattctcaggctccctgcttggaggcaaggctgccctcaccctctcaggggtacagccagaggatgaggcagaatattactgtgttctatggtacagcaaccgctgggtgttcggtggaggaaccaaactgactgtccta

SEQ ID NO: 1252 - protein, 121 aa, Artificial
  unknown organism
EVQLVQSGAEVKKPGASVKVSCKASGYTFTAYYINWLRQTPGQGLEWMGRIYPGSGFTNYNEKLTGRVTMTADTSSNTVYMELSSLRSEDTAVYYCARPGIYYDSTFFTYWGQGTLVTVSS

SEQ ID NO: 1253 - protein, 5 aa, Artificial
  unknown organism
AYYIN

SEQ ID NO: 1254 - protein, 17 aa, Artificial
  unknown organism
RIYPGSGFTNYNEKLTG

SEQ ID NO: 1255 - protein, 12 aa, Artificial
  unknown organism
PGIYYDSTFFTY

SEQ ID NO: 1256 - DNA, 363 bp, Artificial
  unknown organism
gaggtgcagctggtccagtctggagctgaggtgaagaagcctggggcttcagtgaaggtgtcctgcaaggcttctggctacactttcactgcctactatataaactggctgaggcagacgcctggacagggacttgagtggatggggaggatttatcctggaagtggctttactaactacaatgagaaactcacgggcagggtcacaatgactgctgatacatcctccaacactgtctacatggagctgagtagcctgagatctgaggacactgctgtctattactgtgcaagaccgggaatctactatgattcaaccttctttacttactggggccaagggaccctggtcaccgtctcctca

SEQ ID NO: 1257 - protein, 107 aa, Artificial
  unknown organism
DIQMTQSPSSLSASVGDRVTITCRASENIYSYLAWYQQKPGKAPKLLIYNAKTLAEGVPSRFSGSGSGTHFTLTINSLQPEDFATYYCQHHYGTPPTFGQGTKLEIK

SEQ ID NO: 1258 - protein, 11 aa, Artificial
  unknown organism
RASENIYSYLA

SEQ ID NO: 1259 - protein, 7 aa, Artificial
  unknown organism
NAKTLAE

SEQ ID NO: 1260 - protein, 9 aa, Artificial
  unknown organism
QHHYGTPPT

SEQ ID NO: 1261 - DNA, 321 bp, Artificial
  unknown organism
gacatccagatgacccagtctccatcctccctatctgcatctgtgggagatagagtcaccatcacatgtcgagcaagtgagaatatttacagttatttagcatggtatcagcagaaaccgggaaaagctcctaagctcctgatctataatgcaaaaaccttagcagaaggtgtgccatcaaggttcagtggcagtggatcaggcacacattttactctgacgatcaacagcctgcagcctgaagattttgcgacttattactgtcaacatcattatggtactcctcccacgttcggtcaggggaccaagcttgagatcaaa

SEQ ID NO: 1262 - protein, 243 aa, Artificial
  unknown organism
EVQLVQSGAEVKKPGASVKVSCKASGYTFTAYYINWLRQTPGQGLEWMGRIYPGSGFTNYNEKLTGRVTMTADTSSNTVYMELSSLRSEDTAVYYCARPGIYYDSTFFTYWGQGTLVTVSSGGGGSGGGGSGGGGSDIQMTQSPSSLSASVGDRVTITCRASENIYSYLAWYQQKPGKAPKLLIYNAKTLAEGVPSRFSGSGSGTHFTLTINSLQPEDFATYYCQHHYGTPPTFGQGTKLEIK

SEQ ID NO: 1263 - DNA, 729 bp, Artificial
  unknown organism
gaggtgcagctggtccagtctggagctgaggtgaagaagcctggggcttcagtgaaggtgtcctgcaaggcttctggctacactttcactgcctactatataaactggctgaggcagacgcctggacagggacttgagtggatggggaggatttatcctggaagtggctttactaactacaatgagaaactcacgggcagggtcacaatgactgctgatacatcctccaacactgtctacatggagctgagtagcctgagatctgaggacactgctgtctattactgtgcaagaccgggaatctactatgattcaaccttctttacttactggggccaagggaccctggtcaccgtctcctcaggtggtggtggttctggcggcggcggctccggtggtggtggttctgacatccagatgacccagtctccatcctccctatctgcatctgtgggagatagagtcaccatcacatgtcgagcaagtgagaatatttacagttatttagcatggtatcagcagaaaccgggaaaagctcctaagctcctgatctataatgcaaaaaccttagcagaaggtgtgccatcaaggttcagtggcagtggatcaggcacacattttactctgacgatcaacagcctgcagcctgaagattttgcgacttattactgtcaacatcattatggtactcctcccacgttcggtcaggggaccaagcttgagatcaaa

SEQ ID NO: 1264 - protein, 498 aa, Artificial
  unknown organism
EVQLVQSGAEVKKPGASVKVSCKASGYTFTAYYINWLRQTPGQGLEWMGRIYPGSGFTNYNEKLTGRVTMTADTSSNTVYMELSSLRSEDTAVYYCARPGIYYDSTFFTYWGQGTLVTVSSGGGGSGGGGSGGGGSDIQMTQSPSSLSASVGDRVTITCRASENIYSYLAWYQQKPGKAPKLLIYNAKTLAEGVPSRFSGSGSGTHFTLTINSLQPEDFATYYCQHHYGTPPTFGQGTKLEIKSGGGGSEVQLVESGGGLVQPGGSLKLSCAASGFTFNKYAMNWVRQAPGKGLEWVARIRSKYNNYATYYADSVKDRFTISRDDSKNTAYLQMNNLKTEDTAVYYCVRHGNFGNSYISYWAYWGQGTLVTVSSGGGGSGGGGSGGGGSQTVVTQEPSLTVSPGGTVTLTCGSSTGAVTSGNYPNWVQQKPGQAPRGLIGGTKFLAPGTPARFSGSLLGGKAALTLSGVQPEDEAEYYCVLWYSNRWVFGGGTKLTVL

SEQ ID NO: 1265 - DNA, 1494 bp, Artificial
  unknown organism
gaggtgcagctggtccagtctggagctgaggtgaagaagcctggggcttcagtgaaggtgtcctgcaaggcttctggctacactttcactgcctactatataaactggctgaggcagacgcctggacagggacttgagtggatggggaggatttatcctggaagtggctttactaactacaatgagaaactcacgggcagggtcacaatgactgctgatacatcctccaacactgtctacatggagctgagtagcctgagatctgaggacactgctgtctattactgtgcaagaccgggaatctactatgattcaaccttctttacttactggggccaagggaccctggtcaccgtctcctcaggtggtggtggttctggcggcggcggctccggtggtggtggttctgacatccagatgacccagtctccatcctccctatctgcatctgtgggagatagagtcaccatcacatgtcgagcaagtgagaatatttacagttatttagcatggtatcagcagaaaccgggaaaagctcctaagctcctgatctataatgcaaaaaccttagcagaaggtgtgccatcaaggttcagtggcagtggatcaggcacacattttactctgacgatcaacagcctgcagcctgaagattttgcgacttattactgtcaacatcattatggtactcctcccacgttcggtcaggggaccaagcttgagatcaaatccggaggtggtggatccgaggtgcagctggtcgagtctggaggaggattggtgcagcctggagggtcattgaaactctcatgtgcagcctctggattcaccttcaataagtacgccatgaactgggtccgccaggctccaggaaagggtttggaatgggttgctcgcataagaagtaaatataataattatgcaacatattatgccgattcagtgaaagacaggttcaccatctccagagatgattcaaaaaacactgcctatctacaaatgaacaacttgaaaactgaggacactgccgtgtactactgtgtgagacatgggaacttcggtaatagctacatatcctactgggcttactggggccaagggactctggtcaccgtctcctcaggtggtggtggttctggcggcggcggctccggtggtggtggttctcagactgttgtgactcaggaaccttcactcaccgtatcacctggtggaacagtcacactcacttgtggctcctcgactggggctgttacatctggcaactacccaaactgggtccaacaaaaaccaggtcaggcaccccgtggtctaataggtgggactaagttcctcgcccccggtactcctgccagattctcaggctccctgcttggaggcaaggctgccctcaccctctcaggggtacagccagaggatgaggcagaatattactgtgttctatggtacagcaaccgctgggtgttcggtggaggaaccaaactgactgtccta

SEQ ID NO: 1266 - protein, 121 aa, Artificial
  unknown organism
EVQLVQSGAEVVKPGASVKVSCKASGYTFTAYYINWVRQGPGQGLEWMGRIYPGSGFTNYNEKLTGRVTMTADTSSSTVYMELSSLRSEDTAVYYCARPGIYYDSTFFTYWGQGTLVTVSS

SEQ ID NO: 1267 - protein, 5 aa, Artificial
  unknown organism
AYYIN

SEQ ID NO: 1268 - protein, 17 aa, Artificial
  unknown organism
RIYPGSGFTNYNEKLTG

SEQ ID NO: 1269 - protein, 12 aa, Artificial
  unknown organism
PGIYYDSTFFTY

SEQ ID NO: 1270 - DNA, 363 bp, Artificial
  unknown organism
gaggtgcagctggtccagtctggagctgaggtggtgaagcctggggcttcagtgaaggtgtcctgcaaggcttctggctacactttcactgcctactatataaactgggtgaggcaggggcctggacagggacttgagtggatggggaggatttatcctggaagtggctttactaactacaatgagaaactcacgggcagggtcacaatgactgctgatacatcctccagcactgtctacatggagctgagtagcctgagatctgaggacactgctgtctattactgtgcaagaccgggaatctactatgattcaaccttctttacttactggggccaagggaccctggtcaccgtctcctca

SEQ ID NO: 1271 - protein, 107 aa, Artificial
  unknown organism
DIQMTQSPSSLSASVGDRVTITCRASENIYSYLAWYQQKPGKAPKLLIYNAKTLAEGVPSRFSGSGSGTDFTLTISSLQPEDFATYYCQHHYGTPPTFGQGTKLEIK

SEQ ID NO: 1272 - protein, 11 aa, Artificial
  unknown organism
RASENIYSYLA

SEQ ID NO: 1273 - protein, 7 aa, Artificial
  unknown organism
NAKTLAE

SEQ ID NO: 1274 - protein, 9 aa, Artificial
  unknown organism
QHHYGTPPT

SEQ ID NO: 1275 - DNA, 321 bp, Artificial
  unknown organism
gacatccagatgacccagtctccatcctccctatctgcatctgtgggagatagagtcaccatcacatgtcgagcaagtgagaatatttacagttatttagcatggtatcagcagaaaccgggaaaagctcctaagctcctgatctataatgcaaaaaccttagcagaaggtgtgccatcaaggttcagtggcagtggatcaggcacagattttactctgacgatcagcagcctgcagcctgaagattttgcgacttattactgtcaacatcattatggtactcctcccacgttcggtcaggggaccaagcttgagatcaaa

SEQ ID NO: 1276 - protein, 243 aa, Artificial
  unknown organism
EVQLVQSGAEVVKPGASVKVSCKASGYTFTAYYINWVRQGPGQGLEWMGRIYPGSGFTNYNEKLTGRVTMTADTSSSTVYMELSSLRSEDTAVYYCARPGIYYDSTFFTYWGQGTLVTVSSGGGGSGGGGSGGGGSDIQMTQSPSSLSASVGDRVTITCRASENIYSYLAWYQQKPGKAPKLLIYNAKTLAEGVPSRFSGSGSGTDFTLTISSLQPEDFATYYCQHHYGTPPTFGQGTKLEIK

SEQ ID NO: 1277 - DNA, 729 bp, Artificial
  unknown organism
gaggtgcagctggtccagtctggagctgaggtggtgaagcctggggcttcagtgaaggtgtcctgcaaggcttctggctacactttcactgcctactatataaactgggtgaggcaggggcctggacagggacttgagtggatggggaggatttatcctggaagtggctttactaactacaatgagaaactcacgggcagggtcacaatgactgctgatacatcctccagcactgtctacatggagctgagtagcctgagatctgaggacactgctgtctattactgtgcaagaccgggaatctactatgattcaaccttctttacttactggggccaagggaccctggtcaccgtctcctcaggtggtggtggttctggcggcggcggctccggtggtggtggttctgacatccagatgacccagtctccatcctccctatctgcatctgtgggagatagagtcaccatcacatgtcgagcaagtgagaatatttacagttatttagcatggtatcagcagaaaccgggaaaagctcctaagctcctgatctataatgcaaaaaccttagcagaaggtgtgccatcaaggttcagtggcagtggatcaggcacagattttactctgacgatcagcagcctgcagcctgaagattttgcgacttattactgtcaacatcattatggtactcctcccacgttcggtcaggggaccaagcttgagatcaaa

SEQ ID NO: 1278 - protein, 498 aa, Artificial
  unknown organism
EVQLVQSGAEVVKPGASVKVSCKASGYTFTAYYINWVRQGPGQGLEWMGRIYPGSGFTNYNEKLTGRVTMTADTSSSTVYMELSSLRSEDTAVYYCARPGIYYDSTFFTYWGQGTLVTVSSGGGGSGGGGSGGGGSDIQMTQSPSSLSASVGDRVTITCRASENIYSYLAWYQQKPGKAPKLLIYNAKTLAEGVPSRFSGSGSGTDFTLTISSLQPEDFATYYCQHHYGTPPTFGQGTKLEIKSGGGGSEVQLVESGGGLVQPGGSLKLSCAASGFTFNKYAMNWVRQAPGKGLEWVARIRSKYNNYATYYADSVKDRFTISRDDSKNTAYLQMNNLKTEDTAVYYCVRHGNFGNSYISYWAYWGQGTLVTVSSGGGGSGGGGSGGGGSQTVVTQEPSLTVSPGGTVTLTCGSSTGAVTSGNYPNWVQQKPGQAPRGLIGGTKFLAPGTPARFSGSLLGGKAALTLSGVQPEDEAEYYCVLWYSNRWVFGGGTKLTVL

SEQ ID NO: 1279 - DNA, 1494 bp, Artificial
  unknown organism
gaggtgcagctggtccagtctggagctgaggtggtgaagcctggggcttcagtgaaggtgtcctgcaaggcttctggctacactttcactgcctactatataaactgggtgaggcaggggcctggacagggacttgagtggatggggaggatttatcctggaagtggctttactaactacaatgagaaactcacgggcagggtcacaatgactgctgatacatcctccagcactgtctacatggagctgagtagcctgagatctgaggacactgctgtctattactgtgcaagaccgggaatctactatgattcaaccttctttacttactggggccaagggaccctggtcaccgtctcctcaggtggtggtggttctggcggcggcggctccggtggtggtggttctgacatccagatgacccagtctccatcctccctatctgcatctgtgggagatagagtcaccatcacatgtcgagcaagtgagaatatttacagttatttagcatggtatcagcagaaaccgggaaaagctcctaagctcctgatctataatgcaaaaaccttagcagaaggtgtgccatcaaggttcagtggcagtggatcaggcacagattttactctgacgatcagcagcctgcagcctgaagattttgcgacttattactgtcaacatcattatggtactcctcccacgttcggtcaggggaccaagcttgagatcaaatccggaggtggtggatccgaggtgcagctggtcgagtctggaggaggattggtgcagcctggagggtcattgaaactctcatgtgcagcctctggattcaccttcaataagtacgccatgaactgggtccgccaggctccaggaaagggtttggaatgggttgctcgcataagaagtaaatataataattatgcaacatattatgccgattcagtgaaagacaggttcaccatctccagagatgattcaaaaaacactgcctatctacaaatgaacaacttgaaaactgaggacactgccgtgtactactgtgtgagacatgggaacttcggtaatagctacatatcctactgggcttactggggccaagggactctggtcaccgtctcctcaggtggtggtggttctggcggcggcggctccggtggtggtggttctcagactgttgtgactcaggaaccttcactcaccgtatcacctggtggaacagtcacactcacttgtggctcctcgactggggctgttacatctggcaactacccaaactgggtccaacaaaaaccaggtcaggcaccccgtggtctaataggtgggactaagttcctcgcccccggtactcctgccagattctcaggctccctgcttggaggcaaggctgccctcaccctctcaggggtacagccagaggatgaggcagaatattactgtgttctatggtacagcaaccgctgggtgttcggtggaggaaccaaactgactgtccta

SEQ ID NO: 1280 - protein, 120 aa, Artificial
  unknown organism
EVQLVQSGAEVEKPGATVKISCKVSGSKIKDYFVNWVKQAPGKGLEWMGWIDPENDNSLYGPNFQDRVTITADTSTDTAYLELSGLRSEDTAVYYCALYYGSRGDAMDYWGQGTLVTVSS

SEQ ID NO: 1281 - protein, 5 aa, Artificial
  unknown organism
DYFVN

SEQ ID NO: 1282 - protein, 17 aa, Artificial
  unknown organism
WIDPENDNSLYGPNFQD

SEQ ID NO: 1283 - protein, 11 aa, Artificial
  unknown organism
YYGSRGDAMDY

SEQ ID NO: 1284 - DNA, 360 bp, Artificial
  unknown organism
gaggtgcagctggtccagtctggagctgaggttgagaagccaggggccacggtcaagatatcctgcaaagtttctggctccaaaattaaagactactttgtgaactgggtgaagcaggcgcctggaaagggcctggagtggatgggatggattgatcctgagaatgataatagtttatatggcccgaacttccaggacagggtcactatcacagcagacacatccaccgacacagcctacctggagctcagcggcctgagatctgaggacactgccgtctattactgtgctctttattacggaagtaggggggatgctatggactactggggccaagggaccctggtcaccgtctcctca

SEQ ID NO: 1285 - protein, 107 aa, Artificial
  unknown organism
DIQMTQSPSSLSASVGDRVTITCRASQDISNYLNWYQQKPGKAPKLLIYYTSRLHSGVPSRFSGSGSGTDFSLTISSLQPEDFATYYCQQGNTLPLTFGQGTKLEIK

SEQ ID NO: 1286 - protein, 11 aa, Artificial
  unknown organism
RASQDISNYLN

SEQ ID NO: 1287 - protein, 7 aa, Artificial
  unknown organism
YTSRLHS

SEQ ID NO: 1288 - protein, 9 aa, Artificial
  unknown organism
QQGNTLPLT

SEQ ID NO: 1289 - DNA, 321 bp, Artificial
  unknown organism
gacatccagatgacccagtctccatcctccctgtctgcctctgtgggagacagagtcaccatcacttgcagggcaagtcaggacattagcaattatttaaactggtatcagcagaaaccaggcaaggctcctaaactcctgatctactacacttcaagattacactcaggagtcccatcaaggttcagtggcagtgggtctggaacagatttttctctcaccattagcagcctgcagccagaagattttgccacttactattgccaacagggtaatacgcttccgctcacgttcggtcaggggaccaagcttgagatcaaa

SEQ ID NO: 1290 - protein, 242 aa, Artificial
  unknown organism
EVQLVQSGAEVEKPGATVKISCKVSGSKIKDYFVNWVKQAPGKGLEWMGWIDPENDNSLYGPNFQDRVTITADTSTDTAYLELSGLRSEDTAVYYCALYYGSRGDAMDYWGQGTLVTVSSGGGGSGGGGSGGGGSDIQMTQSPSSLSASVGDRVTITCRASQDISNYLNWYQQKPGKAPKLLIYYTSRLHSGVPSRFSGSGSGTDFSLTISSLQPEDFATYYCQQGNTLPLTFGQGTKLEIK

SEQ ID NO: 1291 - DNA, 726 bp, Artificial
  unknown organism
gaggtgcagctggtccagtctggagctgaggttgagaagccaggggccacggtcaagatatcctgcaaagtttctggctccaaaattaaagactactttgtgaactgggtgaagcaggcgcctggaaagggcctggagtggatgggatggattgatcctgagaatgataatagtttatatggcccgaacttccaggacagggtcactatcacagcagacacatccaccgacacagcctacctggagctcagcggcctgagatctgaggacactgccgtctattactgtgctctttattacggaagtaggggggatgctatggactactggggccaagggaccctggtcaccgtctcctcaggtggtggtggttctggcggcggcggctccggtggtggtggttctgacatccagatgacccagtctccatcctccctgtctgcctctgtgggagacagagtcaccatcacttgcagggcaagtcaggacattagcaattatttaaactggtatcagcagaaaccaggcaaggctcctaaactcctgatctactacacttcaagattacactcaggagtcccatcaaggttcagtggcagtgggtctggaacagatttttctctcaccattagcagcctgcagccagaagattttgccacttactattgccaacagggtaatacgcttccgctcacgttcggtcaggggaccaagcttgagatcaaa

SEQ ID NO: 1292 - protein, 497 aa, Artificial
  unknown organism
EVQLVQSGAEVEKPGATVKISCKVSGSKIKDYFVNWVKQAPGKGLEWMGWIDPENDNSLYGPNFQDRVTITADTSTDTAYLELSGLRSEDTAVYYCALYYGSRGDAMDYWGQGTLVTVSSGGGGSGGGGSGGGGSDIQMTQSPSSLSASVGDRVTITCRASQDISNYLNWYQQKPGKAPKLLIYYTSRLHSGVPSRFSGSGSGTDFSLTISSLQPEDFATYYCQQGNTLPLTFGQGTKLEIKSGGGGSEVQLVESGGGLVQPGGSLKLSCAASGFTFNKYAMNWVRQAPGKGLEWVARIRSKYNNYATYYADSVKDRFTISRDDSKNTAYLQMNNLKTEDTAVYYCVRHGNFGNSYISYWAYWGQGTLVTVSSGGGGSGGGGSGGGGSQTVVTQEPSLTVSPGGTVTLTCGSSTGAVTSGNYPNWVQQKPGQAPRGLIGGTKFLAPGTPARFSGSLLGGKAALTLSGVQPEDEAEYYCVLWYSNRWVFGGGTKLTVL

SEQ ID NO: 1293 - DNA, 1491 bp, Artificial
  unknown organism
gaggtgcagctggtccagtctggagctgaggttgagaagccaggggccacggtcaagatatcctgcaaagtttctggctccaaaattaaagactactttgtgaactgggtgaagcaggcgcctggaaagggcctggagtggatgggatggattgatcctgagaatgataatagtttatatggcccgaacttccaggacagggtcactatcacagcagacacatccaccgacacagcctacctggagctcagcggcctgagatctgaggacactgccgtctattactgtgctctttattacggaagtaggggggatgctatggactactggggccaagggaccctggtcaccgtctcctcaggtggtggtggttctggcggcggcggctccggtggtggtggttctgacatccagatgacccagtctccatcctccctgtctgcctctgtgggagacagagtcaccatcacttgcagggcaagtcaggacattagcaattatttaaactggtatcagcagaaaccaggcaaggctcctaaactcctgatctactacacttcaagattacactcaggagtcccatcaaggttcagtggcagtgggtctggaacagatttttctctcaccattagcagcctgcagccagaagattttgccacttactattgccaacagggtaatacgcttccgctcacgttcggtcaggggaccaagcttgagatcaaatccggaggtggtggatccgaggtgcagctggtcgagtctggaggaggattggtgcagcctggagggtcattgaaactctcatgtgcagcctctggattcaccttcaataagtacgccatgaactgggtccgccaggctccaggaaagggtttggaatgggttgctcgcataagaagtaaatataataattatgcaacatattatgccgattcagtgaaagacaggttcaccatctccagagatgattcaaaaaacactgcctatctacaaatgaacaacttgaaaactgaggacactgccgtgtactactgtgtgagacatgggaacttcggtaatagctacatatcctactgggcttactggggccaagggactctggtcaccgtctcctcaggtggtggtggttctggcggcggcggctccggtggtggtggttctcagactgttgtgactcaggaaccttcactcaccgtatcacctggtggaacagtcacactcacttgtggctcctcgactggggctgttacatctggcaactacccaaactgggtccaacaaaaaccaggtcaggcaccccgtggtctaataggtgggactaagttcctcgcccccggtactcctgccagattctcaggctccctgcttggaggcaaggctgccctcaccctctcaggggtacagccagaggatgaggcagaatattactgtgttctatggtacagcaaccgctgggtgttcggtggaggaaccaaactgactgtccta

SEQ ID NO: 1294 - protein, 120 aa, Artificial
  unknown organism
EVQLVQSGAEVKKPGATVKLSCKVSGSTIKDYFVNWVKQTPGKGLEWMGWIDPENDNSLYGPNFQDRVTITADTSTDTAYMELSSLTSEDTAVYYCALYYGSRGDAMDYWGQGTLVTVSS

SEQ ID NO: 1295 - protein, 5 aa, Artificial
  unknown organism
DYFVN

SEQ ID NO: 1296 - protein, 17 aa, Artificial
  unknown organism
WIDPENDNSLYGPNFQD

SEQ ID NO: 1297 - protein, 11 aa, Artificial
  unknown organism
YYGSRGDAMDY

SEQ ID NO: 1298 - DNA, 360 bp, Artificial
  unknown organism
gaggtgcagctggtccagtctggagctgaggttaagaagccaggggccacggtcaagttatcctgcaaagtttctggctccacaattaaagactactttgtgaactgggtgaagcagacgcctggaaagggcctggagtggatgggatggattgatcctgagaatgataatagtttatatggcccgaacttccaggacagggtcactatcacagcagacacatccaccgacacagcctacatggagctcagcagcctgacatctgaggacactgccgtctattactgtgctctttattacggaagtaggggggatgctatggactactggggccaagggaccctggtcaccgtctcctca

SEQ ID NO: 1299 - protein, 107 aa, Artificial
  unknown organism
DIQMTQSPSSLSASVGDRVTITCRASQDISNYLNWYQQKPGKAPKLLIYYTSRLHSGVPSRFSGSGSGTDFTLTISSLQPEDIATYYCQQGNTLPLTFGQGTKLEIK

SEQ ID NO: 1300 - protein, 11 aa, Artificial
  unknown organism
RASQDISNYLN

SEQ ID NO: 1301 - protein, 7 aa, Artificial
  unknown organism
YTSRLHS

SEQ ID NO: 1302 - protein, 9 aa, Artificial
  unknown organism
QQGNTLPLT

SEQ ID NO: 1303 - DNA, 321 bp, Artificial
  unknown organism
gacatccagatgacccagtctccatcctccctgtctgcctctgtgggagacagagtcaccatcacttgcagggcaagtcaggacattagcaattatttaaactggtatcagcagaaaccaggcaaggctcctaaactcctgatctactacacttcaagattacactcaggagtcccatcaaggttcagtggcagtgggtctggaacagattttactctcaccattagcagcctgcagccagaagatattgccacttactattgccaacagggtaatacgcttccgctcacgttcggtcaggggaccaagcttgagatcaaa

SEQ ID NO: 1304 - protein, 242 aa, Artificial
  unknown organism
EVQLVQSGAEVKKPGATVKLSCKVSGSTIKDYFVNWVKQTPGKGLEWMGWIDPENDNSLYGPNFQDRVTITADTSTDTAYMELSSLTSEDTAVYYCALYYGSRGDAMDYWGQGTLVTVSSGGGGSGGGGSGGGGSDIQMTQSPSSLSASVGDRVTITCRASQDISNYLNWYQQKPGKAPKLLIYYTSRLHSGVPSRFSGSGSGTDFTLTISSLQPEDIATYYCQQGNTLPLTFGQGTKLEIK

SEQ ID NO: 1305 - DNA, 726 bp, Artificial
  unknown organism
gaggtgcagctggtccagtctggagctgaggttaagaagccaggggccacggtcaagttatcctgcaaagtttctggctccacaattaaagactactttgtgaactgggtgaagcagacgcctggaaagggcctggagtggatgggatggattgatcctgagaatgataatagtttatatggcccgaacttccaggacagggtcactatcacagcagacacatccaccgacacagcctacatggagctcagcagcctgacatctgaggacactgccgtctattactgtgctctttattacggaagtaggggggatgctatggactactggggccaagggaccctggtcaccgtctcctcaggtggtggtggttctggcggcggcggctccggtggtggtggttctgacatccagatgacccagtctccatcctccctgtctgcctctgtgggagacagagtcaccatcacttgcagggcaagtcaggacattagcaattatttaaactggtatcagcagaaaccaggcaaggctcctaaactcctgatctactacacttcaagattacactcaggagtcccatcaaggttcagtggcagtgggtctggaacagattttactctcaccattagcagcctgcagccagaagatattgccacttactattgccaacagggtaatacgcttccgctcacgttcggtcaggggaccaagcttgagatcaaa

SEQ ID NO: 1306 - protein, 497 aa, Artificial
  unknown organism
EVQLVQSGAEVKKPGATVKLSCKVSGSTIKDYFVNWVKQTPGKGLEWMGWIDPENDNSLYGPNFQDRVTITADTSTDTAYMELSSLTSEDTAVYYCALYYGSRGDAMDYWGQGTLVTVSSGGGGSGGGGSGGGGSDIQMTQSPSSLSASVGDRVTITCRASQDISNYLNWYQQKPGKAPKLLIYYTSRLHSGVPSRFSGSGSGTDFTLTISSLQPEDIATYYCQQGNTLPLTFGQGTKLEIKSGGGGSEVQLVESGGGLVQPGGSLKLSCAASGFTFNKYAMNWVRQAPGKGLEWVARIRSKYNNYATYYADSVKDRFTISRDDSKNTAYLQMNNLKTEDTAVYYCVRHGNFGNSYISYWAYWGQGTLVTVSSGGGGSGGGGSGGGGSQTVVTQEPSLTVSPGGTVTLTCGSSTGAVTSGNYPNWVQQKPGQAPRGLIGGTKFLAPGTPARFSGSLLGGKAALTLSGVQPEDEAEYYCVLWYSNRWVFGGGTKLTVL

SEQ ID NO: 1307 - DNA, 1491 bp, Artificial
  unknown organism
gaggtgcagctggtccagtctggagctgaggttaagaagccaggggccacggtcaagttatcctgcaaagtttctggctccacaattaaagactactttgtgaactgggtgaagcagacgcctggaaagggcctggagtggatgggatggattgatcctgagaatgataatagtttatatggcccgaacttccaggacagggtcactatcacagcagacacatccaccgacacagcctacatggagctcagcagcctgacatctgaggacactgccgtctattactgtgctctttattacggaagtaggggggatgctatggactactggggccaagggaccctggtcaccgtctcctcaggtggtggtggttctggcggcggcggctccggtggtggtggttctgacatccagatgacccagtctccatcctccctgtctgcctctgtgggagacagagtcaccatcacttgcagggcaagtcaggacattagcaattatttaaactggtatcagcagaaaccaggcaaggctcctaaactcctgatctactacacttcaagattacactcaggagtcccatcaaggttcagtggcagtgggtctggaacagattttactctcaccattagcagcctgcagccagaagatattgccacttactattgccaacagggtaatacgcttccgctcacgttcggtcaggggaccaagcttgagatcaaatccggaggtggtggatccgaggtgcagctggtcgagtctggaggaggattggtgcagcctggagggtcattgaaactctcatgtgcagcctctggattcaccttcaataagtacgccatgaactgggtccgccaggctccaggaaagggtttggaatgggttgctcgcataagaagtaaatataataattatgcaacatattatgccgattcagtgaaagacaggttcaccatctccagagatgattcaaaaaacactgcctatctacaaatgaacaacttgaaaactgaggacactgccgtgtactactgtgtgagacatgggaacttcggtaatagctacatatcctactgggcttactggggccaagggactctggtcaccgtctcctcaggtggtggtggttctggcggcggcggctccggtggtggtggttctcagactgttgtgactcaggaaccttcactcaccgtatcacctggtggaacagtcacactcacttgtggctcctcgactggggctgttacatctggcaactacccaaactgggtccaacaaaaaccaggtcaggcaccccgtggtctaataggtgggactaagttcctcgcccccggtactcctgccagattctcaggctccctgcttggaggcaaggctgccctcaccctctcaggggtacagccagaggatgaggcagaatattactgtgttctatggtacagcaaccgctgggtgttcggtggaggaaccaaactgactgtccta

SEQ ID NO: 1308 - protein, 120 aa, Artificial
  unknown organism
EVQLVQSGAEVMKPGATVKISCKVSGSTIKDYFVNWVKQAPGKGLEWMGWIDPENDNSLYGPNFQDRVTITADTSTNTAYMELSSLTSEDTAVYYCALYYGSRGDAMDYWGQGTLVTVSS

SEQ ID NO: 1309 - protein, 5 aa, Artificial
  unknown organism
DYFVN

SEQ ID NO: 1310 - protein, 17 aa, Artificial
  unknown organism
WIDPENDNSLYGPNFQD

SEQ ID NO: 1311 - protein, 11 aa, Artificial
  unknown organism
YYGSRGDAMDY

SEQ ID NO: 1312 - DNA, 360 bp, Artificial
  unknown organism
gaggtgcagctggtccagtctggagctgaggttatgaagccaggggccacggtcaagatatcctgcaaagtttctggctccacaattaaagactactttgtgaactgggtgaagcaggcgcctggaaagggcctggagtggatgggatggattgatcctgagaatgataatagtttatatggcccgaacttccaggacagggtcactatcacagcagacacatccaccaacacagcctacatggagctcagcagcctgacatctgaggacactgccgtctattactgtgctctttattacggaagtaggggggatgctatggactactggggccaagggaccctggtcaccgtctcctca

SEQ ID NO: 1313 - protein, 107 aa, Artificial
  unknown organism
DIQMTQSPSSLSASLGDRVTITCRASQDISNYLNWYQQKPGETPKLLIYYTSRLHSGVPSRFSGSGSGTDFSLTISSLQQEDIATYYCQQGNTLPLTFGQGTKLEIK

SEQ ID NO: 1314 - protein, 11 aa, Artificial
  unknown organism
RASQDISNYLN

SEQ ID NO: 1315 - protein, 7 aa, Artificial
  unknown organism
YTSRLHS

SEQ ID NO: 1316 - protein, 9 aa, Artificial
  unknown organism
QQGNTLPLT

SEQ ID NO: 1317 - DNA, 321 bp, Artificial
  unknown organism
gacatccagatgacccagtctccatcctccctgtctgcctctctgggagacagagtcaccatcacttgcagggcaagtcaggacattagcaattatttaaactggtatcagcagaaaccaggcgagactcctaaactcctgatctactacacttcaagattacactcaggagtcccatcaaggttcagtggcagtgggtctggaacagatttttctctcaccattagcagcctgcagcaagaagatattgccacttactattgccaacagggtaatacgcttccgctcacgttcggtcaggggaccaagcttgagatcaaa

SEQ ID NO: 1318 - protein, 242 aa, Artificial
  unknown organism
EVQLVQSGAEVMKPGATVKISCKVSGSTIKDYFVNWVKQAPGKGLEWMGWIDPENDNSLYGPNFQDRVTITADTSTNTAYMELSSLTSEDTAVYYCALYYGSRGDAMDYWGQGTLVTVSSGGGGSGGGGSGGGGSDIQMTQSPSSLSASLGDRVTITCRASQDISNYLNWYQQKPGETPKLLIYYTSRLHSGVPSRFSGSGSGTDFSLTISSLQQEDIATYYCQQGNTLPLTFGQGTKLEIK

SEQ ID NO: 1319 - DNA, 726 bp, Artificial
  unknown organism
gaggtgcagctggtccagtctggagctgaggttatgaagccaggggccacggtcaagatatcctgcaaagtttctggctccacaattaaagactactttgtgaactgggtgaagcaggcgcctggaaagggcctggagtggatgggatggattgatcctgagaatgataatagtttatatggcccgaacttccaggacagggtcactatcacagcagacacatccaccaacacagcctacatggagctcagcagcctgacatctgaggacactgccgtctattactgtgctctttattacggaagtaggggggatgctatggactactggggccaagggaccctggtcaccgtctcctcaggtggtggtggttctggcggcggcggctccggtggtggtggttctgacatccagatgacccagtctccatcctccctgtctgcctctctgggagacagagtcaccatcacttgcagggcaagtcaggacattagcaattatttaaactggtatcagcagaaaccaggcgagactcctaaactcctgatctactacacttcaagattacactcaggagtcccatcaaggttcagtggcagtgggtctggaacagatttttctctcaccattagcagcctgcagcaagaagatattgccacttactattgccaacagggtaatacgcttccgctcacgttcggtcaggggaccaagcttgagatcaaa

SEQ ID NO: 1320 - protein, 497 aa, Artificial
  unknown organism
EVQLVQSGAEVMKPGATVKISCKVSGSTIKDYFVNWVKQAPGKGLEWMGWIDPENDNSLYGPNFQDRVTITADTSTNTAYMELSSLTSEDTAVYYCALYYGSRGDAMDYWGQGTLVTVSSGGGGSGGGGSGGGGSDIQMTQSPSSLSASLGDRVTITCRASQDISNYLNWYQQKPGETPKLLIYYTSRLHSGVPSRFSGSGSGTDFSLTISSLQQEDIATYYCQQGNTLPLTFGQGTKLEIKSGGGGSEVQLVESGGGLVQPGGSLKLSCAASGFTFNKYAMNWVRQAPGKGLEWVARIRSKYNNYATYYADSVKDRFTISRDDSKNTAYLQMNNLKTEDTAVYYCVRHGNFGNSYISYWAYWGQGTLVTVSSGGGGSGGGGSGGGGSQTVVTQEPSLTVSPGGTVTLTCGSSTGAVTSGNYPNWVQQKPGQAPRGLIGGTKFLAPGTPARFSGSLLGGKAALTLSGVQPEDEAEYYCVLWYSNRWVFGGGTKLTVL

SEQ ID NO: 1321 - DNA, 1491 bp, Artificial
  unknown organism
gaggtgcagctggtccagtctggagctgaggttatgaagccaggggccacggtcaagatatcctgcaaagtttctggctccacaattaaagactactttgtgaactgggtgaagcaggcgcctggaaagggcctggagtggatgggatggattgatcctgagaatgataatagtttatatggcccgaacttccaggacagggtcactatcacagcagacacatccaccaacacagcctacatggagctcagcagcctgacatctgaggacactgccgtctattactgtgctctttattacggaagtaggggggatgctatggactactggggccaagggaccctggtcaccgtctcctcaggtggtggtggttctggcggcggcggctccggtggtggtggttctgacatccagatgacccagtctccatcctccctgtctgcctctctgggagacagagtcaccatcacttgcagggcaagtcaggacattagcaattatttaaactggtatcagcagaaaccaggcgagactcctaaactcctgatctactacacttcaagattacactcaggagtcccatcaaggttcagtggcagtgggtctggaacagatttttctctcaccattagcagcctgcagcaagaagatattgccacttactattgccaacagggtaatacgcttccgctcacgttcggtcaggggaccaagcttgagatcaaatccggaggtggtggatccgaggtgcagctggtcgagtctggaggaggattggtgcagcctggagggtcattgaaactctcatgtgcagcctctggattcaccttcaataagtacgccatgaactgggtccgccaggctccaggaaagggtttggaatgggttgctcgcataagaagtaaatataataattatgcaacatattatgccgattcagtgaaagacaggttcaccatctccagagatgattcaaaaaacactgcctatctacaaatgaacaacttgaaaactgaggacactgccgtgtactactgtgtgagacatgggaacttcggtaatagctacatatcctactgggcttactggggccaagggactctggtcaccgtctcctcaggtggtggtggttctggcggcggcggctccggtggtggtggttctcagactgttgtgactcaggaaccttcactcaccgtatcacctggtggaacagtcacactcacttgtggctcctcgactggggctgttacatctggcaactacccaaactgggtccaacaaaaaccaggtcaggcaccccgtggtctaataggtgggactaagttcctcgcccccggtactcctgccagattctcaggctccctgcttggaggcaaggctgccctcaccctctcaggggtacagccagaggatgaggcagaatattactgtgttctatggtacagcaaccgctgggtgttcggtggaggaaccaaactgactgtccta

SEQ ID NO: 1322 - protein, 120 aa, Artificial
  unknown organism
EVQLVQSGAEVKKPGASVKISCKVSGSKIKDYFVNWVQQRPGKGLEWMGWIDPENDNSLYGPNFQDRVTITADTSTDTAYMELSGLRSEDTAVYYCALYYGSRGDAMDYWGQGTLVTVSS

SEQ ID NO: 1323 - protein, 5 aa, Artificial
  unknown organism
DYFVN

SEQ ID NO: 1324 - protein, 17 aa, Artificial
  unknown organism
WIDPENDNSLYGPNFQD

SEQ ID NO: 1325 - protein, 11 aa, Artificial
  unknown organism
YYGSRGDAMDY

SEQ ID NO: 1326 - DNA, 360 bp, Artificial
  unknown organism
gaggtgcagctggtccagtctggagctgaggttaagaagccaggggcctcggtcaagatatcctgcaaagtttctggctccaaaattaaagactactttgtgaactgggtgcagcagaggcctggaaagggcctggagtggatgggatggattgatcctgagaatgataatagtttatatggcccgaacttccaggacagggtcactatcacagcagacacatccaccgacacagcctacatggagctcagcggcctgagatctgaggacactgccgtctattactgtgctctttattacggaagtaggggggatgctatggactactggggccaagggaccctggtcaccgtctcctca

SEQ ID NO: 1327 - protein, 107 aa, Artificial
  unknown organism
DIQMTQSPSSLSASVGDRVTISCRASQDISNYLNWYQQKPGKTPKLLIYYTSRLHSGVPSRFSGSGSGTDYTLTISSLQPEDFATYYCQQGNTLPLTFGQGTKLEIK

SEQ ID NO: 1328 - protein, 11 aa, Artificial
  unknown organism
RASQDISNYLN

SEQ ID NO: 1329 - protein, 7 aa, Artificial
  unknown organism
YTSRLHS

SEQ ID NO: 1330 - protein, 9 aa, Artificial
  unknown organism
QQGNTLPLT

SEQ ID NO: 1331 - DNA, 321 bp, Artificial
  unknown organism
gacatccagatgacccagtctccatcctccctgtctgcctctgtgggagacagagtcaccatcagttgcagggcaagtcaggacattagcaattatttaaactggtatcagcagaaaccaggcaagactcctaaactcctgatctactacacatcaagattacactcaggagtcccatcaaggttcagtggcagtgggtctggaacagattatactctcaccattagcagcctgcagccagaagattttgccacttactattgccaacagggtaatacgcttccgctcacgttcggtcaggggaccaagcttgagatcaaa

SEQ ID NO: 1332 - protein, 242 aa, Artificial
  unknown organism
EVQLVQSGAEVKKPGASVKISCKVSGSKIKDYFVNWVQQRPGKGLEWMGWIDPENDNSLYGPNFQDRVTITADTSTDTAYMELSGLRSEDTAVYYCALYYGSRGDAMDYWGQGTLVTVSSGGGGSGGGGSGGGGSDIQMTQSPSSLSASVGDRVTISCRASQDISNYLNWYQQKPGKTPKLLIYYTSRLHSGVPSRFSGSGSGTDYTLTISSLQPEDFATYYCQQGNTLPLTFGQGTKLEIK

SEQ ID NO: 1333 - DNA, 726 bp, Artificial
  unknown organism
gaggtgcagctggtccagtctggagctgaggttaagaagccaggggcctcggtcaagatatcctgcaaagtttctggctccaaaattaaagactactttgtgaactgggtgcagcagaggcctggaaagggcctggagtggatgggatggattgatcctgagaatgataatagtttatatggcccgaacttccaggacagggtcactatcacagcagacacatccaccgacacagcctacatggagctcagcggcctgagatctgaggacactgccgtctattactgtgctctttattacggaagtaggggggatgctatggactactggggccaagggaccctggtcaccgtctcctcaggtggtggtggttctggcggcggcggctccggtggtggtggttctgacatccagatgacccagtctccatcctccctgtctgcctctgtgggagacagagtcaccatcagttgcagggcaagtcaggacattagcaattatttaaactggtatcagcagaaaccaggcaagactcctaaactcctgatctactacacatcaagattacactcaggagtcccatcaaggttcagtggcagtgggtctggaacagattatactctcaccattagcagcctgcagccagaagattttgccacttactattgccaacagggtaatacgcttccgctcacgttcggtcaggggaccaagcttgagatcaaa

SEQ ID NO: 1334 - protein, 497 aa, Artificial
  unknown organism
EVQLVQSGAEVKKPGASVKISCKVSGSKIKDYFVNWVQQRPGKGLEWMGWIDPENDNSLYGPNFQDRVTITADTSTDTAYMELSGLRSEDTAVYYCALYYGSRGDAMDYWGQGTLVTVSSGGGGSGGGGSGGGGSDIQMTQSPSSLSASVGDRVTISCRASQDISNYLNWYQQKPGKTPKLLIYYTSRLHSGVPSRFSGSGSGTDYTLTISSLQPEDFATYYCQQGNTLPLTFGQGTKLEIKSGGGGSEVQLVESGGGLVQPGGSLKLSCAASGFTFNKYAMNWVRQAPGKGLEWVARIRSKYNNYATYYADSVKDRFTISRDDSKNTAYLQMNNLKTEDTAVYYCVRHGNFGNSYISYWAYWGQGTLVTVSSGGGGSGGGGSGGGGSQTVVTQEPSLTVSPGGTVTLTCGSSTGAVTSGNYPNWVQQKPGQAPRGLIGGTKFLAPGTPARFSGSLLGGKAALTLSGVQPEDEAEYYCVLWYSNRWVFGGGTKLTVL

SEQ ID NO: 1335 - DNA, 1491 bp, Artificial
  unknown organism
gaggtgcagctggtccagtctggagctgaggttaagaagccaggggcctcggtcaagatatcctgcaaagtttctggctccaaaattaaagactactttgtgaactgggtgcagcagaggcctggaaagggcctggagtggatgggatggattgatcctgagaatgataatagtttatatggcccgaacttccaggacagggtcactatcacagcagacacatccaccgacacagcctacatggagctcagcggcctgagatctgaggacactgccgtctattactgtgctctttattacggaagtaggggggatgctatggactactggggccaagggaccctggtcaccgtctcctcaggtggtggtggttctggcggcggcggctccggtggtggtggttctgacatccagatgacccagtctccatcctccctgtctgcctctgtgggagacagagtcaccatcagttgcagggcaagtcaggacattagcaattatttaaactggtatcagcagaaaccaggcaagactcctaaactcctgatctactacacatcaagattacactcaggagtcccatcaaggttcagtggcagtgggtctggaacagattatactctcaccattagcagcctgcagccagaagattttgccacttactattgccaacagggtaatacgcttccgctcacgttcggtcaggggaccaagcttgagatcaaatccggaggtggtggatccgaggtgcagctggtcgagtctggaggaggattggtgcagcctggagggtcattgaaactctcatgtgcagcctctggattcaccttcaataagtacgccatgaactgggtccgccaggctccaggaaagggtttggaatgggttgctcgcataagaagtaaatataataattatgcaacatattatgccgattcagtgaaagacaggttcaccatctccagagatgattcaaaaaacactgcctatctacaaatgaacaacttgaaaactgaggacactgccgtgtactactgtgtgagacatgggaacttcggtaatagctacatatcctactgggcttactggggccaagggactctggtcaccgtctcctcaggtggtggtggttctggcggcggcggctccggtggtggtggttctcagactgttgtgactcaggaaccttcactcaccgtatcacctggtggaacagtcacactcacttgtggctcctcgactggggctgttacatctggcaactacccaaactgggtccaacaaaaaccaggtcaggcaccccgtggtctaataggtgggactaagttcctcgcccccggtactcctgccagattctcaggctccctgcttggaggcaaggctgccctcaccctctcaggggtacagccagaggatgaggcagaatattactgtgttctatggtacagcaaccgctgggtgttcggtggaggaaccaaactgactgtccta

SEQ ID NO: 1336 - protein, 505 aa, Artificial
  unknown organism
EVQLVESGGGLVQPGGSLKLSCAASGFTFNKYAMNWVRQAPGKGLEWVARIRSKYNNYATYYADSVKDRFTISRDDSKNTAYLQMNNLKTEDTAVYYCVRHGNFGNSYISYWAYWGQGTLVTVSSGGGGSGGGGSGGGGSQTVVTQEPSLTVSPGGTVTLTCGSSTGAVTSGYYPNWVQQKPGQAPRGLIGGTKFLAPGTPARFSGSLLGGKAALTLSGVQPEDEAEYYCALWYSNRWVFGGGTKLTVLSGGGGSQVQLVQSGAEVKKPGASVKVSCKASGYTFTNYGMNWVKQAPGQGLKWMGWINTYTGEPTYADDFKGRVTMTSDTSTSTAYLELHNLRSDDTAVYYCARWSWSDGYYVYFDYWGQGTTVTVSSGGGGSGGGGSGGGGSDIVMTQSPDSLTVSLGERTTINCKSSQSVLDSSKNKNSLAWYQQKPGQPPKLLLSWASTRESGIPDRFSGSGSGTDFTLTIDSLQPEDSATYYCQQSAHFPITFGQGTRLEIK

SEQ ID NO: 1337 - DNA, 1515 bp, Artificial
  unknown organism
gaggtgcagctggtcgagtctggaggaggattggtgcagcctggagggtcattgaaactctcatgtgcagcctctggattcaccttcaataagtacgccatgaactgggtccgccaggctccaggaaagggtttggaatgggttgctcgcataagaagtaaatataataattatgcaacatattatgccgattcagtgaaagacaggttcaccatctccagagatgattcaaaaaacactgcctatctacaaatgaacaacttgaaaactgaggacactgccgtgtactactgtgtgagacatgggaacttcggtaatagctacatatcctactgggcttactggggccaagggactctggtcaccgtctcctcaggtggtggtggttctggcggcggcggctccggtggtggtggttctcagactgttgtgactcaggaaccttcactcaccgtatcacctggtggaacagtcacactcacttgtggctcctcgactggggctgttacatctggctactacccaaactgggtccaacaaaaaccaggtcaggcaccccgtggtctaataggtgggactaagttcctcgcccccggtactcctgccagattctcaggctccctgcttggaggcaaggctgccctcaccctctcaggggtacagccagaggatgaggcagaatattactgtgctctatggtacagcaaccgctgggtgttcggtggaggaaccaaactgactgtcctatccggaggtggtggctcccaggtgcagctggtccagtctggagctgaggtgaagaagcctggagcgtcagtcaaggtctcctgcaaggctagcgggtataccttcacaaactatggaatgaactgggtgaagcaggctccaggacagggtttaaagtggatgggctggataaacacctacactggagagccaacatatgctgatgacttcaagggacgggttaccatgacttcggatacctctaccagcactgcctatttggaactccacaacctcagaagtgatgacacggctgtatattactgtgcgcgctggagttggagtgatggttactacgtttactttgactactggggccaaggcactacggtcaccgtctcctcaggtggtggtggttctggcggcggcggctccggtggtggtggttctgacatcgtgatgacacagtctccagactccctgactgtgtctctgggcgagaggaccaccatcaactgcaagtccagccagagtgttttagacagctccaagaataagaactccttagcttggtaccagcagaaaccaggacagcctcctaaattactcctttcctgggcatctacgcgggaatccgggatccctgaccgattcagtggcagcgggtctgggacagatttcactctcactattgacagcctgcagcctgaagattctgcaacttactattgtcaacagtctgcccacttcccgatcacctttggccaagggacacgactggagattaaa

SEQ ID NO: 1338 - protein, 505 aa, Artificial
  unknown organism
EVQLVESGGGLVQPGGSLKLSCAASGFTFNSYAMNWVRQAPGKGLEWVARIRSKYNNYATYYADSVKGRFTISRDDSKNTAYLQMNNLKTEDTAVYYCVRHGNFGNSYVSWWAYWGQGTLVTVSSGGGGSGGGGSGGGGSQTVVTQEPSLTVSPGGTVTLTCGSSTGAVTSGNYPNWVQQKPGQAPRGLIGGTKFLAPGTPARFSGSLLGGKAALTLSGVQPEDEAEYYCVLWYSNRWVFGGGTKLTVLSGGGGSQVQLVQSGAEVKKPGASVKVSCKASGYTFTNYGMNWVKQAPGQGLKWMGWINTYTGEPTYADDFKGRVTMTSDTSTSTAYLELHNLRSDDTAVYYCARWSWSDGYYVYFDYWGQGTTVTVSSGGGGSGGGGSGGGGSDIVMTQSPDSLTVSLGERTTINCKSSQSVLDSSKNKNSLAWYQQKPGQPPKLLLSWASTRESGIPDRFSGSGSGTDFTLTIDSLQPEDSATYYCQQSAHFPITFGQGTRLEIK

SEQ ID NO: 1339 - DNA, 1515 bp, Artificial
  unknown organism
gaggtgcagctggtcgagtctggaggaggattggtgcagcctggagggtcattgaaactctcatgtgcagcctctggattcaccttcaatagctacgccatgaactgggtccgccaggctccaggaaagggtttggaatgggttgctcgcataagaagtaaatataataattatgcaacatattatgccgattcagtgaaaggcaggttcaccatctccagagatgattcaaaaaacactgcctatctacaaatgaacaacttgaaaactgaggacactgccgtgtactactgtgtgagacatgggaacttcggtaatagctacgtttcctggtgggcttactggggccaagggactctggtcaccgtctcctcaggtggtggtggttctggcggcggcggctccggtggtggtggttctcagactgttgtgactcaggaaccttcactcaccgtatcacctggtggaacagtcacactcacttgtggctcctcgactggggctgttacatctggcaactacccaaactgggtccaacaaaaaccaggtcaggcaccccgtggtctaataggtgggactaagttcctcgcccccggtactcctgccagattctcaggctccctgcttggaggcaaggctgccctcaccctctcaggggtacagccagaggatgaggcagaatattactgtgttctatggtacagcaaccgctgggtgttcggtggaggaaccaaactgactgtcctatccggaggtggtggctcccaggtgcagctggtccagtctggagctgaggtgaagaagcctggagcgtcagtcaaggtctcctgcaaggctagcgggtataccttcacaaactatggaatgaactgggtgaagcaggctccaggacagggtttaaagtggatgggctggataaacacctacactggagagccaacatatgctgatgacttcaagggacgggttaccatgacttcggatacctctaccagcactgcctatttggaactccacaacctcagaagtgatgacacggctgtatattactgtgcgcgctggagttggagtgatggttactacgtttactttgactactggggccaaggcactacggtcaccgtctcctcaggtggtggtggttctggcggcggcggctccggtggtggtggttctgacatcgtgatgacacagtctccagactccctgactgtgtctctgggcgagaggaccaccatcaactgcaagtccagccagagtgttttagacagctccaagaataagaactccttagcttggtaccagcagaaaccaggacagcctcctaaattactcctttcctgggcatctacgcgggaatccgggatccctgaccgattcagtggcagcgggtctgggacagatttcactctcactattgacagcctgcagcctgaagattctgcaacttactattgtcaacagtctgcccacttcccgatcacctttggccaagggacacgactggagattaaa

SEQ ID NO: 1340 - protein, 505 aa, Artificial
  unknown organism
EVQLVESGGGLVQPGGSLKLSCAASGFTFNKYAMNWVRQAPGKGLEWVARIRSKYNNYATYYADSVKDRFTISRDDSKNTAYLQMNNLKTEDTAVYYCVRHGNFGNSYISYWAYWGQGTLVTVSSGGGGSGGGGSGGGGSQTVVTQEPSLTVSPGGTVTLTCGSSTGAVTSGNYPNWVQQKPGQAPRGLIGGTKFLAPGTPARFSGSLLGGKAALTLSGVQPEDEAEYYCVLWYSNRWVFGGGTKLTVLSGGGGSQVQLVQSGAEVKKPGASVKVSCKASGYTFTNYGMNWVKQAPGQGLKWMGWINTYTGEPTYADDFKGRVTMTSDTSTSTAYLELHNLRSDDTAVYYCARWSWSDGYYVYFDYWGQGTTVTVSSGGGGSGGGGSGGGGSDIVMTQSPDSLTVSLGERTTINCKSSQSVLDSSKNKNSLAWYQQKPGQPPKLLLSWASTRESGIPDRFSGSGSGTDFTLTIDSLQPEDSATYYCQQSAHFPITFGQGTRLEIK

SEQ ID NO: 1341 - DNA, 1515 bp, Artificial
  unknown organism
gaggtgcagctggtcgagtctggaggaggattggtgcagcctggagggtcattgaaactctcatgtgcagcctctggattcaccttcaataagtacgccatgaactgggtccgccaggctccaggaaagggtttggaatgggttgctcgcataagaagtaaatataataattatgcaacatattatgccgattcagtgaaagacaggttcaccatctccagagatgattcaaaaaacactgcctatctacaaatgaacaacttgaaaactgaggacactgccgtgtactactgtgtgagacatgggaacttcggtaatagctacatatcctactgggcttactggggccaagggactctggtcaccgtctcctcaggtggtggtggttctggcggcggcggctccggtggtggtggttctcagactgttgtgactcaggaaccttcactcaccgtatcacctggtggaacagtcacactcacttgtggctcctcgactggggctgttacatctggcaactacccaaactgggtccaacaaaaaccaggtcaggcaccccgtggtctaataggtgggactaagttcctcgcccccggtactcctgccagattctcaggctccctgcttggaggcaaggctgccctcaccctctcaggggtacagccagaggatgaggcagaatattactgtgttctatggtacagcaaccgctgggtgttcggtggaggaaccaaactgactgtcctatccggaggtggtggctcccaggtgcagctggtccagtctggagctgaggtgaagaagcctggagcgtcagtcaaggtctcctgcaaggctagcgggtataccttcacaaactatggaatgaactgggtgaagcaggctccaggacagggtttaaagtggatgggctggataaacacctacactggagagccaacatatgctgatgacttcaagggacgggttaccatgacttcggatacctctaccagcactgcctatttggaactccacaacctcagaagtgatgacacggctgtatattactgtgcgcgctggagttggagtgatggttactacgtttactttgactactggggccaaggcactacggtcaccgtctcctcaggtggtggtggttctggcggcggcggctccggtggtggtggttctgacatcgtgatgacacagtctccagactccctgactgtgtctctgggcgagaggaccaccatcaactgcaagtccagccagagtgttttagacagctccaagaataagaactccttagcttggtaccagcagaaaccaggacagcctcctaaattactcctttcctgggcatctacgcgggaatccgggatccctgaccgattcagtggcagcgggtctgggacagatttcactctcactattgacagcctgcagcctgaagattctgcaacttactattgtcaacagtctgcccacttcccgatcacctttggccaagggacacgactggagattaaa

SEQ ID NO: 1342 - protein, 117 aa, Artificial
  unknown organism
QVQLVQSGAEVKKPGASVKVSCKASGYPFTGYYMHWVRQAPGQGLEWMGWINPNSGGTNYAQKFQGRVTITADESTSTAYMELSRLRSDDTAVYYCAKSWVSWFASWGQGTLVTVSS

SEQ ID NO: 1343 - protein, 5 aa, Artificial
  unknown organism
GYYMH

SEQ ID NO: 1344 - protein, 17 aa, Artificial
  unknown organism
WINPNSGGTNYAQKFQG

SEQ ID NO: 1345 - protein, 8 aa, Artificial
  unknown organism
SWVSWFAS

SEQ ID NO: 1346 - DNA, 351 bp, Artificial
  unknown organism
caggtgcagctggtccagtctggggctgaggtgaagaagcctggggcctcagtgaaggtctcctgcaaggcttctggataccccttcaccggctactacatgcactgggtgcgacaggcccctggacaagggcttgagtggatgggatggatcaaccctaacagtggtggcacaaactatgcacagaagtttcagggcagagtcacgattaccgcggacgaatccacgagcacagcctacatggagctgagcaggctgagatctgacgacacggccgtgtattactgtgcgaaatcctgggtctcctggtttgcttcctggggtcaaggaaccttggtcaccgtctcctca

SEQ ID NO: 1347 - protein, 113 aa, Artificial
  unknown organism
DIVMTQSPDSLAVSLGERATINCKSSQSVLSSSNNKNYLNWYQQKPGQPPKLLIYWASTRESGVPDRFSGSGSGTDFTLTISSLQAEDVAVYYCQQHFNTPFAFGQGTKLEIK

SEQ ID NO: 1348 - protein, 17 aa, Artificial
  unknown organism
KSSQSVLSSSNNKNYLN

SEQ ID NO: 1349 - protein, 7 aa, Artificial
  unknown organism
WASTRES

SEQ ID NO: 1350 - protein, 9 aa, Artificial
  unknown organism
QQHFNTPFA

SEQ ID NO: 1351 - DNA, 339 bp, Artificial
  unknown organism
gacatcgtgatgacacagtctccagactccctggctgtgtctctgggcgagagggccaccatcaactgcaagtccagccagagtgtcttatccagctccaacaataagaactacttaaattggtaccagcagaaaccaggacagcctcctaagttgctcatttactgggcatctacccgggaatccggggtccctgaccgattcagtggcagcgggtctgggacagatttcactctcaccatcagcagcctgcaggctgaagatgtggcggtttattactgtcaacaacattttaatactccgttcgcttttggccaggggaccaagctggagatcaaa

SEQ ID NO: 1352 - protein, 245 aa, Artificial
  unknown organism
QVQLVQSGAEVKKPGASVKVSCKASGYPFTGYYMHWVRQAPGQGLEWMGWINPNSGGTNYAQKFQGRVTITADESTSTAYMELSRLRSDDTAVYYCAKSWVSWFASWGQGTLVTVSSGGGGSGGGGSGGGGSDIVMTQSPDSLAVSLGERATINCKSSQSVLSSSNNKNYLNWYQQKPGQPPKLLIYWASTRESGVPDRFSGSGSGTDFTLTISSLQAEDVAVYYCQQHFNTPFAFGQGTKLEIK

SEQ ID NO: 1353 - DNA, 735 bp, Artificial
  unknown organism
caggtgcagctggtccagtctggggctgaggtgaagaagcctggggcctcagtgaaggtctcctgcaaggcttctggataccccttcaccggctactacatgcactgggtgcgacaggcccctggacaagggcttgagtggatgggatggatcaaccctaacagtggtggcacaaactatgcacagaagtttcagggcagagtcacgattaccgcggacgaatccacgagcacagcctacatggagctgagcaggctgagatctgacgacacggccgtgtattactgtgcgaaatcctgggtctcctggtttgcttcctggggtcaaggaaccttggtcaccgtctcctcaggtggtggtggttctggcggcggcggctccggtggtggtggttctgacatcgtgatgacacagtctccagactccctggctgtgtctctgggcgagagggccaccatcaactgcaagtccagccagagtgtcttatccagctccaacaataagaactacttaaattggtaccagcagaaaccaggacagcctcctaagttgctcatttactgggcatctacccgggaatccggggtccctgaccgattcagtggcagcgggtctgggacagatttcactctcaccatcagcagcctgcaggctgaagatgtggcggtttattactgtcaacaacattttaatactccgttcgcttttggccaggggaccaagctggagatcaaa

SEQ ID NO: 1354 - protein, 500 aa, Artificial
  unknown organism
QVQLVQSGAEVKKPGASVKVSCKASGYPFTGYYMHWVRQAPGQGLEWMGWINPNSGGTNYAQKFQGRVTITADESTSTAYMELSRLRSDDTAVYYCAKSWVSWFASWGQGTLVTVSSGGGGSGGGGSGGGGSDIVMTQSPDSLAVSLGERATINCKSSQSVLSSSNNKNYLNWYQQKPGQPPKLLIYWASTRESGVPDRFSGSGSGTDFTLTISSLQAEDVAVYYCQQHFNTPFAFGQGTKLEIKSGGGGSEVQLVESGGGLVQPGGSLKLSCAASGFTFNKYAMNWVRQAPGKGLEWVARIRSKYNNYATYYADSVKDRFTISRDDSKNTAYLQMNNLKTEDTAVYYCVRHGNFGNSYISYWAYWGQGTLVTVSSGGGGSGGGGSGGGGSQTVVTQEPSLTVSPGGTVTLTCGSSTGAVTSGYYPNWVQQKPGQAPRGLIGGTKFLAPGTPARFSGSLLGGKAALTLSGVQPEDEAEYYCALWYSNRWVFGGGTKLTVL

SEQ ID NO: 1355 - DNA, 1500 bp, Artificial
  unknown organism
caggtgcagctggtccagtctggggctgaggtgaagaagcctggggcctcagtgaaggtctcctgcaaggcttctggataccccttcaccggctactacatgcactgggtgcgacaggcccctggacaagggcttgagtggatgggatggatcaaccctaacagtggtggcacaaactatgcacagaagtttcagggcagagtcacgattaccgcggacgaatccacgagcacagcctacatggagctgagcaggctgagatctgacgacacggccgtgtattactgtgcgaaatcctgggtctcctggtttgcttcctggggtcaaggaaccttggtcaccgtctcctcaggtggtggtggttctggcggcggcggctccggtggtggtggttctgacatcgtgatgacacagtctccagactccctggctgtgtctctgggcgagagggccaccatcaactgcaagtccagccagagtgtcttatccagctccaacaataagaactacttaaattggtaccagcagaaaccaggacagcctcctaagttgctcatttactgggcatctacccgggaatccggggtccctgaccgattcagtggcagcgggtctgggacagatttcactctcaccatcagcagcctgcaggctgaagatgtggcggtttattactgtcaacaacattttaatactccgttcgcttttggccaggggaccaagctggagatcaaatccggaggtggtggatccgaggtgcagctggtcgagtctggaggaggattggtgcagcctggagggtcattgaaactctcatgtgcagcctctggattcaccttcaataagtacgccatgaactgggtccgccaggctccaggaaagggtttggaatgggttgctcgcataagaagtaaatataataattatgcaacatattatgccgattcagtgaaagacaggttcaccatctccagagatgattcaaaaaacactgcctatctacaaatgaacaacttgaaaactgaggacactgccgtgtactactgtgtgagacatgggaacttcggtaatagctacatatcctactgggcttactggggccaagggactctggtcaccgtctcctcaggtggtggtggttctggcggcggcggctccggtggtggtggttctcagactgttgtgactcaggaaccttcactcaccgtatcacctggtggaacagtcacactcacttgtggctcctcgactggggctgttacatctggctactacccaaactgggtccaacaaaaaccaggtcaggcaccccgtggtctaataggtgggactaagttcctcgcccccggtactcctgccagattctcaggctccctgcttggaggcaaggctgccctcaccctctcaggggtacagccagaggatgaggcagaatattactgtgctctatggtacagcaaccgctgggtgttcggtggaggaaccaaactgactgtccta

SEQ ID NO: 1356 - protein, 500 aa, Artificial
  unknown organism
QVQLVQSGAEVKKPGASVKVSCKASGYPFTGYYMHWVRQAPGQGLEWMGWINPNSGGTNYAQKFQGRVTITADESTSTAYMELSRLRSDDTAVYYCAKSWVSWFASWGQGTLVTVSSGGGGSGGGGSGGGGSDIVMTQSPDSLAVSLGERATINCKSSQSVLSSSNNKNYLNWYQQKPGQPPKLLIYWASTRESGVPDRFSGSGSGTDFTLTISSLQAEDVAVYYCQQHFNTPFAFGQGTKLEIKSGGGGSEVQLVESGGGLVQPGGSLKLSCAASGFTFNSYAMNWVRQAPGKGLEWVARIRSKYNNYATYYADSVKGRFTISRDDSKNTAYLQMNNLKTEDTAVYYCVRHGNFGNSYVSWWAYWGQGTLVTVSSGGGGSGGGGSGGGGSQTVVTQEPSLTVSPGGTVTLTCGSSTGAVTSGNYPNWVQQKPGQAPRGLIGGTKFLAPGTPARFSGSLLGGKAALTLSGVQPEDEAEYYCVLWYSNRWVFGGGTKLTVL

SEQ ID NO: 1357 - DNA, 1500 bp, Artificial
  unknown organism
caggtgcagctggtccagtctggggctgaggtgaagaagcctggggcctcagtgaaggtctcctgcaaggcttctggataccccttcaccggctactacatgcactgggtgcgacaggcccctggacaagggcttgagtggatgggatggatcaaccctaacagtggtggcacaaactatgcacagaagtttcagggcagagtcacgattaccgcggacgaatccacgagcacagcctacatggagctgagcaggctgagatctgacgacacggccgtgtattactgtgcgaaatcctgggtctcctggtttgcttcctggggtcaaggaaccttggtcaccgtctcctcaggtggtggtggttctggcggcggcggctccggtggtggtggttctgacatcgtgatgacacagtctccagactccctggctgtgtctctgggcgagagggccaccatcaactgcaagtccagccagagtgtcttatccagctccaacaataagaactacttaaattggtaccagcagaaaccaggacagcctcctaagttgctcatttactgggcatctacccgggaatccggggtccctgaccgattcagtggcagcgggtctgggacagatttcactctcaccatcagcagcctgcaggctgaagatgtggcggtttattactgtcaacaacattttaatactccgttcgcttttggccaggggaccaagctggagatcaaatccggaggtggtggatccgaggtgcagctggtcgagtctggaggaggattggtgcagcctggagggtcattgaaactctcatgtgcagcctctggattcaccttcaatagctacgccatgaactgggtccgccaggctccaggaaagggtttggaatgggttgctcgcataagaagtaaatataataattatgcaacatattatgccgattcagtgaaaggcaggttcaccatctccagagatgattcaaaaaacactgcctatctacaaatgaacaacttgaaaactgaggacactgccgtgtactactgtgtgagacatgggaacttcggtaatagctacgtttcctggtgggcttactggggccaagggactctggtcaccgtctcctcaggtggtggtggttctggcggcggcggctccggtggtggtggttctcagactgttgtgactcaggaaccttcactcaccgtatcacctggtggaacagtcacactcacttgtggctcctcgactggggctgttacatctggcaactacccaaactgggtccaacaaaaaccaggtcaggcaccccgtggtctaataggtgggactaagttcctcgcccccggtactcctgccagattctcaggctccctgcttggaggcaaggctgccctcaccctctcaggggtacagccagaggatgaggcagaatattactgtgttctatggtacagcaaccgctgggtgttcggtggaggaaccaaactgactgtccta

SEQ ID NO: 1358 - protein, 500 aa, Artificial
  unknown organism
QVQLVQSGAEVKKPGASVKVSCKASGYPFTGYYMHWVRQAPGQGLEWMGWINPNSGGTNYAQKFQGRVTITADESTSTAYMELSRLRSDDTAVYYCAKSWVSWFASWGQGTLVTVSSGGGGSGGGGSGGGGSDIVMTQSPDSLAVSLGERATINCKSSQSVLSSSNNKNYLNWYQQKPGQPPKLLIYWASTRESGVPDRFSGSGSGTDFTLTISSLQAEDVAVYYCQQHFNTPFAFGQGTKLEIKSGGGGSEVQLVESGGGLVQPGGSLKLSCAASGFTFNKYAMNWVRQAPGKGLEWVARIRSKYNNYATYYADSVKDRFTISRDDSKNTAYLQMNNLKTEDTAVYYCVRHGNFGNSYISYWAYWGQGTLVTVSSGGGGSGGGGSGGGGSQTVVTQEPSLTVSPGGTVTLTCGSSTGAVTSGNYPNWVQQKPGQAPRGLIGGTKFLAPGTPARFSGSLLGGKAALTLSGVQPEDEAEYYCVLWYSNRWVFGGGTKLTVL

SEQ ID NO: 1359 - DNA, 1500 bp, Artificial
  unknown organism
caggtgcagctggtccagtctggggctgaggtgaagaagcctggggcctcagtgaaggtctcctgcaaggcttctggataccccttcaccggctactacatgcactgggtgcgacaggcccctggacaagggcttgagtggatgggatggatcaaccctaacagtggtggcacaaactatgcacagaagtttcagggcagagtcacgattaccgcggacgaatccacgagcacagcctacatggagctgagcaggctgagatctgacgacacggccgtgtattactgtgcgaaatcctgggtctcctggtttgcttcctggggtcaaggaaccttggtcaccgtctcctcaggtggtggtggttctggcggcggcggctccggtggtggtggttctgacatcgtgatgacacagtctccagactccctggctgtgtctctgggcgagagggccaccatcaactgcaagtccagccagagtgtcttatccagctccaacaataagaactacttaaattggtaccagcagaaaccaggacagcctcctaagttgctcatttactgggcatctacccgggaatccggggtccctgaccgattcagtggcagcgggtctgggacagatttcactctcaccatcagcagcctgcaggctgaagatgtggcggtttattactgtcaacaacattttaatactccgttcgcttttggccaggggaccaagctggagatcaaatccggaggtggtggatccgaggtgcagctggtcgagtctggaggaggattggtgcagcctggagggtcattgaaactctcatgtgcagcctctggattcaccttcaataagtacgccatgaactgggtccgccaggctccaggaaagggtttggaatgggttgctcgcataagaagtaaatataataattatgcaacatattatgccgattcagtgaaagacaggttcaccatctccagagatgattcaaaaaacactgcctatctacaaatgaacaacttgaaaactgaggacactgccgtgtactactgtgtgagacatgggaacttcggtaatagctacatatcctactgggcttactggggccaagggactctggtcaccgtctcctcaggtggtggtggttctggcggcggcggctccggtggtggtggttctcagactgttgtgactcaggaaccttcactcaccgtatcacctggtggaacagtcacactcacttgtggctcctcgactggggctgttacatctggcaactacccaaactgggtccaacaaaaaccaggtcaggcaccccgtggtctaataggtgggactaagttcctcgcccccggtactcctgccagattctcaggctccctgcttggaggcaaggctgccctcaccctctcaggggtacagccagaggatgaggcagaatattactgtgttctatggtacagcaaccgctgggtgttcggtggaggaaccaaactgactgtccta

SEQ ID NO: 1360 - protein, 117 aa, Artificial; identical to SEQ ID NO: 207
  unknown organism

SEQ ID NO: 1361 - protein, 5 aa, Artificial
  unknown organism
NYYIH

SEQ ID NO: 1362 - protein, 17 aa, Artificial
  unknown organism
WINPNSGATNYAQKFQG

SEQ ID NO: 1363 - protein, 8 aa, Artificial
  unknown organism
SWVSWFAS

SEQ ID NO: 1364 - DNA, 351 bp, Artificial; identical to SEQ ID NO: 208
  unknown organism

SEQ ID NO: 1365 - protein, 113 aa, Artificial
  unknown organism
DIVMTQSPDSLAVSLGERATINCKSSQSVLNSKNNRNYLAWYQQKPGQPPKLLIYWASTRESGVPDRFSGSGSGTDFTLTISGLQAEDVAVYYCQQHYSTPFTFGPGTKVDIK

SEQ ID NO: 1366 - protein, 17 aa, Artificial
  unknown organism
KSSQSVLNSKNNRNYLA

SEQ ID NO: 1367 - protein, 7 aa, Artificial
  unknown organism
WASTRES

SEQ ID NO: 1368 - protein, 9 aa, Artificial
  unknown organism
QQHYSTPFT

SEQ ID NO: 1369 - DNA, 339 bp, Artificial
  unknown organism
gacatcgtgatgacccagtctccagactccctggctgtgtctctgggcgagagggccaccatcaactgcaagtccagccagagtgttttaaacagcaagaacaataggaactacttagcttggtaccagcagaaaccaggacagcctcctaagctgctcatttactgggcatctacccgggaatccggggtccctgaccgattcagtggcagcgggtctgggacagatttcactctcaccatcagtggcctgcaggctgaagatgtggcagtttattactgtcagcaacattatagtactccattcacttttggccctgggaccaaagtggatatcaaa

SEQ ID NO: 1370 - protein, 245 aa, Artificial
  unknown organism
QVQLVQSGAEVKRPGASMKVSCKASGYTFTNYYIHWVRQAPGQGLEWMGWINPNSGATNYAQKFQGRVTMTRDTSTSTVYMELSSLRSEDTAVYYCAKSWVSWFASWGQGTLVTVSSGGGGSGGGGSGGGGSDIVMTQSPDSLAVSLGERATINCKSSQSVLNSKNNRNYLAWYQQKPGQPPKLLIYWASTRESGVPDRFSGSGSGTDFTLTISGLQAEDVAVYYCQQHYSTPFTFGPGTKVDIK

SEQ ID NO: 1371 - DNA, 735 bp, Artificial
  unknown organism
caggtgcagctggtccagtctggggctgaggtgaagaggcctggggcctcaatgaaggtctcctgcaaggcttctgggtacaccttcaccaactactatatacactgggtgcgacaggcccctggacaaggtcttgagtggatgggttggatcaaccctaacagtggtgccacaaactatgcacagaagttccagggcagagtcaccatgaccagggacacgtccacgagcacagtctacatggagctgagcagcctgagatctgaggacacggccgtgtattactgtgcgaaatcctgggtctcctggtttgcttcctggggtcaaggaaccttggtcaccgtctcctcaggtggtggtggttctggcggcggcggctccggtggtggtggttctgacatcgtgatgacccagtctccagactccctggctgtgtctctgggcgagagggccaccatcaactgcaagtccagccagagtgttttaaacagcaagaacaataggaactacttagcttggtaccagcagaaaccaggacagcctcctaagctgctcatttactgggcatctacccgggaatccggggtccctgaccgattcagtggcagcgggtctgggacagatttcactctcaccatcagtggcctgcaggctgaagatgtggcagtttattactgtcagcaacattatagtactccattcacttttggccctgggaccaaagtggatatcaaa

SEQ ID NO: 1372 - protein, 500 aa, Artificial
  unknown organism
QVQLVQSGAEVKRPGASMKVSCKASGYTFTNYYIHWVRQAPGQGLEWMGWINPNSGATNYAQKFQGRVTMTRDTSTSTVYMELSSLRSEDTAVYYCAKSWVSWFASWGQGTLVTVSSGGGGSGGGGSGGGGSDIVMTQSPDSLAVSLGERATINCKSSQSVLNSKNNRNYLAWYQQKPGQPPKLLIYWASTRESGVPDRFSGSGSGTDFTLTISGLQAEDVAVYYCQQHYSTPFTFGPGTKVDIKSGGGGSEVQLVESGGGLVQPGGSLKLSCAASGFTFNKYAMNWVRQAPGKGLEWVARIRSKYNNYATYYADSVKDRFTISRDDSKNTAYLQMNNLKTEDTAVYYCVRHGNFGNSYISYWAYWGQGTLVTVSSGGGGSGGGGSGGGGSQTVVTQEPSLTVSPGGTVTLTCGSSTGAVTSGNYPNWVQQKPGQAPRGLIGGTKFLAPGTPARFSGSLLGGKAALTLSGVQPEDEAEYYCVLWYSNRWVFGGGTKLTVL

SEQ ID NO: 1373 - DNA, 1500 bp, Artificial
  unknown organism
caggtgcagctggtccagtctggggctgaggtgaagaggcctggggcctcaatgaaggtctcctgcaaggcttctgggtacaccttcaccaactactatatacactgggtgcgacaggcccctggacaaggtcttgagtggatgggttggatcaaccctaacagtggtgccacaaactatgcacagaagttccagggcagagtcaccatgaccagggacacgtccacgagcacagtctacatggagctgagcagcctgagatctgaggacacggccgtgtattactgtgcgaaatcctgggtctcctggtttgcttcctggggtcaaggaaccttggtcaccgtctcctcaggtggtggtggttctggcggcggcggctccggtggtggtggttctgacatcgtgatgacccagtctccagactccctggctgtgtctctgggcgagagggccaccatcaactgcaagtccagccagagtgttttaaacagcaagaacaataggaactacttagcttggtaccagcagaaaccaggacagcctcctaagctgctcatttactgggcatctacccgggaatccggggtccctgaccgattcagtggcagcgggtctgggacagatttcactctcaccatcagtggcctgcaggctgaagatgtggcagtttattactgtcagcaacattatagtactccattcacttttggccctgggaccaaagtggatatcaaatccggaggtggtggatccgaggtgcagctggtcgagtctggaggaggattggtgcagcctggagggtcattgaaactctcatgtgcagcctctggattcaccttcaataagtacgccatgaactgggtccgccaggctccaggaaagggtttggaatgggttgctcgcataagaagtaaatataataattatgcaacatattatgccgattcagtgaaagacaggttcaccatctccagagatgattcaaaaaacactgcctatctacaaatgaacaacttgaaaactgaggacactgccgtgtactactgtgtgagacatgggaacttcggtaatagctacatatcctactgggcttactggggccaagggactctggtcaccgtctcctcaggtggtggtggttctggcggcggcggctccggtggtggtggttctcagactgttgtgactcaggaaccttcactcaccgtatcacctggtggaacagtcacactcacttgtggctcctcgactggggctgttacatctggcaactacccaaactgggtccaacaaaaaccaggtcaggcaccccgtggtctaataggtgggactaagttcctcgcccccggtactcctgccagattctcaggctccctgcttggaggcaaggctgccctcaccctctcaggggtacagccagaggatgaggcagaatattactgtgttctatggtacagcaaccgctgggtgttcggtggaggaaccaaactgactgtccta

SEQ ID NO: 1374 - protein, 117 aa, Artificial; identical to SEQ ID NO: 207
  unknown organism

SEQ ID NO: 1375 - protein, 5 aa, Artificial
  unknown organism
NYYIH

SEQ ID NO: 1376 - protein, 17 aa, Artificial
  unknown organism
WINPNSGATNYAQKFQG

SEQ ID NO: 1377 - protein, 8 aa, Artificial
  unknown organism
SWVSWFAS

SEQ ID NO: 1378 - DNA, 351 bp, Artificial; identical to SEQ ID NO: 208
  unknown organism

SEQ ID NO: 1379 - protein, 113 aa, Artificial
  unknown organism
DIVMTQSPDSLTVSPGERATINCKSSQSVLNSKNNRNYLAWYQQKPGQPPKLLIYWASTRESGVPDRFSGSGSGTDFTLTIDSLQPEDSATYYCQQHYSTPFTFGQGTRLEIK

SEQ ID NO: 1380 - protein, 17 aa, Artificial
  unknown organism
KSSQSVLNSKNNRNYLA

SEQ ID NO: 1381 - protein, 7 aa, Artificial
  unknown organism
WASTRES

SEQ ID NO: 1382 - protein, 9 aa, Artificial
  unknown organism
QQHYSTPFT

SEQ ID NO: 1383 - DNA, 339 bp, Artificial
  unknown organism
gacatcgtgatgacccagtctccagactccctgactgtgtctccgggcgagagggccaccatcaactgcaagtccagccagagtgttttaaacagcaagaacaataggaactacttagcttggtaccagcagaaaccaggacagcctcctaagctgctcatttactgggcatctacccgggaatccggggtccctgaccgattcagtggcagcgggtctgggacagatttcactctcaccatcgattccctgcagcctgaagatagtgcaacttattactgtcagcaacattatagtactccattcacttttggccaggggaccagactggagatcaaa

SEQ ID NO: 1384 - protein, 245 aa, Artificial
  unknown organism
QVQLVQSGAEVKRPGASMKVSCKASGYTFTNYYIHWVRQAPGQGLEWMGWINPNSGATNYAQKFQGRVTMTRDTSTSTVYMELSSLRSEDTAVYYCAKSWVSWFASWGQGTLVTVSSGGGGSGGGGSGGGGSDIVMTQSPDSLTVSPGERATINCKSSQSVLNSKNNRNYLAWYQQKPGQPPKLLIYWASTRESGVPDRFSGSGSGTDFTLTIDSLQPEDSATYYCQQHYSTPFTFGQGTRLEIK

SEQ ID NO: 1385 - DNA, 735 bp, Artificial
  unknown organism
caggtgcagctggtccagtctggggctgaggtgaagaggcctggggcctcaatgaaggtctcctgcaaggcttctgggtacaccttcaccaactactatatacactgggtgcgacaggcccctggacaaggtcttgagtggatgggttggatcaaccctaacagtggtgccacaaactatgcacagaagttccagggcagagtcaccatgaccagggacacgtccacgagcacagtctacatggagctgagcagcctgagatctgaggacacggccgtgtattactgtgcgaaatcctgggtctcctggtttgcttcctggggtcaaggaaccttggtcaccgtctcctcaggtggtggtggttctggcggcggcggctccggtggtggtggttctgacatcgtgatgacccagtctccagactccctgactgtgtctccgggcgagagggccaccatcaactgcaagtccagccagagtgttttaaacagcaagaacaataggaactacttagcttggtaccagcagaaaccaggacagcctcctaagctgctcatttactgggcatctacccgggaatccggggtccctgaccgattcagtggcagcgggtctgggacagatttcactctcaccatcgattccctgcagcctgaagatagtgcaacttattactgtcagcaacattatagtactccattcacttttggccaggggaccagactggagatcaaa

SEQ ID NO: 1386 - protein, 500 aa, Artificial
  unknown organism
QVQLVQSGAEVKRPGASMKVSCKASGYTFTNYYIHWVRQAPGQGLEWMGWINPNSGATNYAQKFQGRVTMTRDTSTSTVYMELSSLRSEDTAVYYCAKSWVSWFASWGQGTLVTVSSGGGGSGGGGSGGGGSDIVMTQSPDSLTVSPGERATINCKSSQSVLNSKNNRNYLAWYQQKPGQPPKLLIYWASTRESGVPDRFSGSGSGTDFTLTIDSLQPEDSATYYCQQHYSTPFTFGQGTRLEIKSGGGGSEVQLVESGGGLVQPGGSLKLSCAASGFTFNKYAMNWVRQAPGKGLEWVARIRSKYNNYATYYADSVKDRFTISRDDSKNTAYLQMNNLKTEDTAVYYCVRHGNFGNSYISYWAYWGQGTLVTVSSGGGGSGGGGSGGGGSQTVVTQEPSLTVSPGGTVTLTCGSSTGAVTSGNYPNWVQQKPGQAPRGLIGGTKFLAPGTPARFSGSLLGGKAALTLSGVQPEDEAEYYCVLWYSNRWVFGGGTKLTVL

SEQ ID NO: 1387 - DNA, 1500 bp, Artificial
  unknown organism
caggtgcagctggtccagtctggggctgaggtgaagaggcctggggcctcaatgaaggtctcctgcaaggcttctgggtacaccttcaccaactactatatacactgggtgcgacaggcccctggacaaggtcttgagtggatgggttggatcaaccctaacagtggtgccacaaactatgcacagaagttccagggcagagtcaccatgaccagggacacgtccacgagcacagtctacatggagctgagcagcctgagatctgaggacacggccgtgtattactgtgcgaaatcctgggtctcctggtttgcttcctggggtcaaggaaccttggtcaccgtctcctcaggtggtggtggttctggcggcggcggctccggtggtggtggttctgacatcgtgatgacccagtctccagactccctgactgtgtctccgggcgagagggccaccatcaactgcaagtccagccagagtgttttaaacagcaagaacaataggaactacttagcttggtaccagcagaaaccaggacagcctcctaagctgctcatttactgggcatctacccgggaatccggggtccctgaccgattcagtggcagcgggtctgggacagatttcactctcaccatcgattccctgcagcctgaagatagtgcaacttattactgtcagcaacattatagtactccattcacttttggccaggggaccagactggagatcaaatccggaggtggtggatccgaggtgcagctggtcgagtctggaggaggattggtgcagcctggagggtcattgaaactctcatgtgcagcctctggattcaccttcaataagtacgccatgaactgggtccgccaggctccaggaaagggtttggaatgggttgctcgcataagaagtaaatataataattatgcaacatattatgccgattcagtgaaagacaggttcaccatctccagagatgattcaaaaaacactgcctatctacaaatgaacaacttgaaaactgaggacactgccgtgtactactgtgtgagacatgggaacttcggtaatagctacatatcctactgggcttactggggccaagggactctggtcaccgtctcctcaggtggtggtggttctggcggcggcggctccggtggtggtggttctcagactgttgtgactcaggaaccttcactcaccgtatcacctggtggaacagtcacactcacttgtggctcctcgactggggctgttacatctggcaactacccaaactgggtccaacaaaaaccaggtcaggcaccccgtggtctaataggtgggactaagttcctcgcccccggtactcctgccagattctcaggctccctgcttggaggcaaggctgccctcaccctctcaggggtacagccagaggatgaggcagaatattactgtgttctatggtacagcaaccgctgggtgttcggtggaggaaccaaactgactgtccta

SEQ ID NO: 1388 - protein, 117 aa, Artificial; identical to SEQ ID NO: 207
  unknown organism

SEQ ID NO: 1389 - protein, 5 aa, Artificial
  unknown organism
NYYIH

SEQ ID NO: 1390 - protein, 17 aa, Artificial
  unknown organism
WINPNSGATNYAQKFQG

SEQ ID NO: 1391 - protein, 8 aa, Artificial
  unknown organism
SWVSWFAS

SEQ ID NO: 1392 - DNA, 351 bp, Artificial; identical to SEQ ID NO: 208
  unknown organism

SEQ ID NO: 1393 - protein, 113 aa, Artificial
  unknown organism
DIVMTQSPDSLTVSLGERTTINCKSSQSVLNSKNNRNYLAWYQQKPGQPPKLLIYWASTRESGVPDRFSGSGSGTDFTLTIDSLQPEDIATYYCQQHYSTPFTFGQGTRLEIK

SEQ ID NO: 1394 - protein, 17 aa, Artificial
  unknown organism
KSSQSVLNSKNNRNYLA

SEQ ID NO: 1395 - protein, 7 aa, Artificial
  unknown organism
WASTRES

SEQ ID NO: 1396 - protein, 9 aa, Artificial
  unknown organism
QQHYSTPFT

SEQ ID NO: 1397 - DNA, 339 bp, Artificial
  unknown organism
gacatcgtgatgacccagtctccagactccctgactgtgtctctgggcgagaggaccaccatcaactgcaagtccagccagagtgttttaaacagcaagaacaataggaactacttagcttggtaccagcagaaaccaggacagcctcctaagctgctcatttactgggcatctacccgggaatccggggtccctgaccgattcagtggcagcgggtctgggacagatttcactctcaccatcgattccctgcagcctgaagatattgcaacttattactgtcagcaacattatagtactccattcacttttggccaggggaccagactggagatcaaa

SEQ ID NO: 1398 - protein, 245 aa, Artificial
  unknown organism
QVQLVQSGAEVKRPGASMKVSCKASGYTFTNYYIHWVRQAPGQGLEWMGWINPNSGATNYAQKFQGRVTMTRDTSTSTVYMELSSLRSEDTAVYYCAKSWVSWFASWGQGTLVTVSSGGGGSGGGGSGGGGSDIVMTQSPDSLTVSLGERTTINCKSSQSVLNSKNNRNYLAWYQQKPGQPPKLLIYWASTRESGVPDRFSGSGSGTDFTLTIDSLQPEDIATYYCQQHYSTPFTFGQGTRLEIK

SEQ ID NO: 1399 - DNA, 735 bp, Artificial
  unknown organism
caggtgcagctggtccagtctggggctgaggtgaagaggcctggggcctcaatgaaggtctcctgcaaggcttctgggtacaccttcaccaactactatatacactgggtgcgacaggcccctggacaaggtcttgagtggatgggttggatcaaccctaacagtggtgccacaaactatgcacagaagttccagggcagagtcaccatgaccagggacacgtccacgagcacagtctacatggagctgagcagcctgagatctgaggacacggccgtgtattactgtgcgaaatcctgggtctcctggtttgcttcctggggtcaaggaaccttggtcaccgtctcctcaggtggtggtggttctggcggcggcggctccggtggtggtggttctgacatcgtgatgacccagtctccagactccctgactgtgtctctgggcgagaggaccaccatcaactgcaagtccagccagagtgttttaaacagcaagaacaataggaactacttagcttggtaccagcagaaaccaggacagcctcctaagctgctcatttactgggcatctacccgggaatccggggtccctgaccgattcagtggcagcgggtctgggacagatttcactctcaccatcgattccctgcagcctgaagatattgcaacttattactgtcagcaacattatagtactccattcacttttggccaggggaccagactggagatcaaa

SEQ ID NO: 1400 - protein, 500 aa, Artificial
  unknown organism
QVQLVQSGAEVKRPGASMKVSCKASGYTFTNYYIHWVRQAPGQGLEWMGWINPNSGATNYAQKFQGRVTMTRDTSTSTVYMELSSLRSEDTAVYYCAKSWVSWFASWGQGTLVTVSSGGGGSGGGGSGGGGSDIVMTQSPDSLTVSLGERTTINCKSSQSVLNSKNNRNYLAWYQQKPGQPPKLLIYWASTRESGVPDRFSGSGSGTDFTLTIDSLQPEDIATYYCQQHYSTPFTFGQGTRLEIKSGGGGSEVQLVESGGGLVQPGGSLKLSCAASGFTFNKYAMNWVRQAPGKGLEWVARIRSKYNNYATYYADSVKDRFTISRDDSKNTAYLQMNNLKTEDTAVYYCVRHGNFGNSYISYWAYWGQGTLVTVSSGGGGSGGGGSGGGGSQTVVTQEPSLTVSPGGTVTLTCGSSTGAVTSGNYPNWVQQKPGQAPRGLIGGTKFLAPGTPARFSGSLLGGKAALTLSGVQPEDEAEYYCVLWYSNRWVFGGGTKLTVL

SEQ ID NO: 1401 - DNA, 1500 bp, Artificial
  unknown organism
caggtgcagctggtccagtctggggctgaggtgaagaggcctggggcctcaatgaaggtctcctgcaaggcttctgggtacaccttcaccaactactatatacactgggtgcgacaggcccctggacaaggtcttgagtggatgggttggatcaaccctaacagtggtgccacaaactatgcacagaagttccagggcagagtcaccatgaccagggacacgtccacgagcacagtctacatggagctgagcagcctgagatctgaggacacggccgtgtattactgtgcgaaatcctgggtctcctggtttgcttcctggggtcaaggaaccttggtcaccgtctcctcaggtggtggtggttctggcggcggcggctccggtggtggtggttctgacatcgtgatgacccagtctccagactccctgactgtgtctctgggcgagaggaccaccatcaactgcaagtccagccagagtgttttaaacagcaagaacaataggaactacttagcttggtaccagcagaaaccaggacagcctcctaagctgctcatttactgggcatctacccgggaatccggggtccctgaccgattcagtggcagcgggtctgggacagatttcactctcaccatcgattccctgcagcctgaagatattgcaacttattactgtcagcaacattatagtactccattcacttttggccaggggaccagactggagatcaaatccggaggtggtggatccgaggtgcagctggtcgagtctggaggaggattggtgcagcctggagggtcattgaaactctcatgtgcagcctctggattcaccttcaataagtacgccatgaactgggtccgccaggctccaggaaagggtttggaatgggttgctcgcataagaagtaaatataataattatgcaacatattatgccgattcagtgaaagacaggttcaccatctccagagatgattcaaaaaacactgcctatctacaaatgaacaacttgaaaactgaggacactgccgtgtactactgtgtgagacatgggaacttcggtaatagctacatatcctactgggcttactggggccaagggactctggtcaccgtctcctcaggtggtggtggttctggcggcggcggctccggtggtggtggttctcagactgttgtgactcaggaaccttcactcaccgtatcacctggtggaacagtcacactcacttgtggctcctcgactggggctgttacatctggcaactacccaaactgggtccaacaaaaaccaggtcaggcaccccgtggtctaataggtgggactaagttcctcgcccccggtactcctgccagattctcaggctccctgcttggaggcaaggctgccctcaccctctcaggggtacagccagaggatgaggcagaatattactgtgttctatggtacagcaaccgctgggtgttcggtggaggaaccaaactgactgtccta

SEQ ID NO: 1402 - protein, 117 aa, Artificial; identical to SEQ ID NO: 207
  unknown organism

SEQ ID NO: 1403 - protein, 5 aa, Artificial
  unknown organism
NYYIH

SEQ ID NO: 1404 - protein, 17 aa, Artificial
  unknown organism
WINPNSGATNYAQKFQG

SEQ ID NO: 1405 - protein, 8 aa, Artificial
  unknown organism
SWVSWFAS

SEQ ID NO: 1406 - DNA, 351 bp, Artificial; identical to SEQ ID NO: 208
  unknown organism

SEQ ID NO: 1407 - protein, 113 aa, Artificial
  unknown organism
DIVMTQSPDSLTVSLGERATINCKSSQSVLNSKNNRNYLAWYQQKPGQPPKLLIYWASTRESGVPDRFSGSGSGTDFTLTIDSLQPEDSATYYCQQHYSTPFTFGQGTRLEIK

SEQ ID NO: 1408 - protein, 17 aa, Artificial
  unknown organism
KSSQSVLNSKNNRNYLA

SEQ ID NO: 1409 - protein, 7 aa, Artificial
  unknown organism
WASTRES

SEQ ID NO: 1410 - protein, 9 aa, Artificial
  unknown organism
QQHYSTPFT

SEQ ID NO: 1411 - DNA, 339 bp, Artificial
  unknown organism
gacatcgtgatgacccagtctccagactccctgactgtgtctctgggcgagagggccaccatcaactgcaagtccagccagagtgttttaaacagcaagaacaataggaactacttagcttggtaccagcagaaaccaggacagcctcctaagctgctcatttactgggcatctacccgggaatccggggtccctgaccgattcagtggcagcgggtctgggacagatttcactctcaccatcgattccctgcagcctgaagatagtgcaacttattactgtcagcaacattatagtactccattcacttttggccaggggaccagactggagatcaaa

SEQ ID NO: 1412 - protein, 245 aa, Artificial
  unknown organism
QVQLVQSGAEVKRPGASMKVSCKASGYTFTNYYIHWVRQAPGQGLEWMGWINPNSGATNYAQKFQGRVTMTRDTSTSTVYMELSSLRSEDTAVYYCAKSWVSWFASWGQGTLVTVSSGGGGSGGGGSGGGGSDIVMTQSPDSLTVSLGERATINCKSSQSVLNSKNNRNYLAWYQQKPGQPPKLLIYWASTRESGVPDRFSGSGSGTDFTLTIDSLQPEDSATYYCQQHYSTPFTFGQGTRLEIK

SEQ ID NO: 1413 - DNA, 735 bp, Artificial
  unknown organism
caggtgcagctggtccagtctggggctgaggtgaagaggcctggggcctcaatgaaggtctcctgcaaggcttctgggtacaccttcaccaactactatatacactgggtgcgacaggcccctggacaaggtcttgagtggatgggttggatcaaccctaacagtggtgccacaaactatgcacagaagttccagggcagagtcaccatgaccagggacacgtccacgagcacagtctacatggagctgagcagcctgagatctgaggacacggccgtgtattactgtgcgaaatcctgggtctcctggtttgcttcctggggtcaaggaaccttggtcaccgtctcctcaggtggtggtggttctggcggcggcggctccggtggtggtggttctgacatcgtgatgacccagtctccagactccctgactgtgtctctgggcgagagggccaccatcaactgcaagtccagccagagtgttttaaacagcaagaacaataggaactacttagcttggtaccagcagaaaccaggacagcctcctaagctgctcatttactgggcatctacccgggaatccggggtccctgaccgattcagtggcagcgggtctgggacagatttcactctcaccatcgattccctgcagcctgaagatagtgcaacttattactgtcagcaacattatagtactccattcacttttggccaggggaccagactggagatcaaa

SEQ ID NO: 1414 - protein, 500 aa, Artificial
  unknown organism
QVQLVQSGAEVKRPGASMKVSCKASGYTFTNYYIHWVRQAPGQGLEWMGWINPNSGATNYAQKFQGRVTMTRDTSTSTVYMELSSLRSEDTAVYYCAKSWVSWFASWGQGTLVTVSSGGGGSGGGGSGGGGSDIVMTQSPDSLTVSLGERATINCKSSQSVLNSKNNRNYLAWYQQKPGQPPKLLIYWASTRESGVPDRFSGSGSGTDFTLTIDSLQPEDSATYYCQQHYSTPFTFGQGTRLEIKSGGGGSEVQLVESGGGLVQPGGSLKLSCAASGFTFNKYAMNWVRQAPGKGLEWVARIRSKYNNYATYYADSVKDRFTISRDDSKNTAYLQMNNLKTEDTAVYYCVRHGNFGNSYISYWAYWGQGTLVTVSSGGGGSGGGGSGGGGSQTVVTQEPSLTVSPGGTVTLTCGSSTGAVTSGNYPNWVQQKPGQAPRGLIGGTKFLAPGTPARFSGSLLGGKAALTLSGVQPEDEAEYYCVLWYSNRWVFGGGTKLTVL

SEQ ID NO: 1415 - DNA, 1500 bp, Artificial
  unknown organism
caggtgcagctggtccagtctggggctgaggtgaagaggcctggggcctcaatgaaggtctcctgcaaggcttctgggtacaccttcaccaactactatatacactgggtgcgacaggcccctggacaaggtcttgagtggatgggttggatcaaccctaacagtggtgccacaaactatgcacagaagttccagggcagagtcaccatgaccagggacacgtccacgagcacagtctacatggagctgagcagcctgagatctgaggacacggccgtgtattactgtgcgaaatcctgggtctcctggtttgcttcctggggtcaaggaaccttggtcaccgtctcctcaggtggtggtggttctggcggcggcggctccggtggtggtggttctgacatcgtgatgacccagtctccagactccctgactgtgtctctgggcgagagggccaccatcaactgcaagtccagccagagtgttttaaacagcaagaacaataggaactacttagcttggtaccagcagaaaccaggacagcctcctaagctgctcatttactgggcatctacccgggaatccggggtccctgaccgattcagtggcagcgggtctgggacagatttcactctcaccatcgattccctgcagcctgaagatagtgcaacttattactgtcagcaacattatagtactccattcacttttggccaggggaccagactggagatcaaatccggaggtggtggatccgaggtgcagctggtcgagtctggaggaggattggtgcagcctggagggtcattgaaactctcatgtgcagcctctggattcaccttcaataagtacgccatgaactgggtccgccaggctccaggaaagggtttggaatgggttgctcgcataagaagtaaatataataattatgcaacatattatgccgattcagtgaaagacaggttcaccatctccagagatgattcaaaaaacactgcctatctacaaatgaacaacttgaaaactgaggacactgccgtgtactactgtgtgagacatgggaacttcggtaatagctacatatcctactgggcttactggggccaagggactctggtcaccgtctcctcaggtggtggtggttctggcggcggcggctccggtggtggtggttctcagactgttgtgactcaggaaccttcactcaccgtatcacctggtggaacagtcacactcacttgtggctcctcgactggggctgttacatctggcaactacccaaactgggtccaacaaaaaccaggtcaggcaccccgtggtctaataggtgggactaagttcctcgcccccggtactcctgccagattctcaggctccctgcttggaggcaaggctgccctcaccctctcaggggtacagccagaggatgaggcagaatattactgtgttctatggtacagcaaccgctgggtgttcggtggaggaaccaaactgactgtccta

SEQ ID NO: 1416 - protein, 117 aa, Artificial; identical to SEQ ID NO: 207
  unknown organism

SEQ ID NO: 1417 - protein, 5 aa, Artificial
  unknown organism
NYYIH

SEQ ID NO: 1418 - protein, 17 aa, Artificial
  unknown organism
WINPNSGATNYAQKFQG

SEQ ID NO: 1419 - protein, 8 aa, Artificial
  unknown organism
SWVSWFAS

SEQ ID NO: 1420 - DNA, 351 bp, Artificial; identical to SEQ ID NO: 208
  unknown organism

SEQ ID NO: 1421 - protein, 113 aa, Artificial
  unknown organism
DIVMTQSPDSLAVSLGERATINCKSSQSVLNSKNNRNYLAWYQQKPGQPPKLLIYWASTRESGVPDRFSGSGSGTDFTLTIDSLQAEDSATYYCQQHYSTPFTFGQGTRLEIK

SEQ ID NO: 1422 - protein, 17 aa, Artificial
  unknown organism
KSSQSVLNSKNNRNYLA

SEQ ID NO: 1423 - protein, 7 aa, Artificial
  unknown organism
WASTRES

SEQ ID NO: 1424 - protein, 9 aa, Artificial
  unknown organism
QQHYSTPFT

SEQ ID NO: 1425 - DNA, 339 bp, Artificial
  unknown organism
gacatcgtgatgacccagtctccagactccctggctgtgtctctgggcgagagggccaccatcaactgcaagtccagccagagtgttttaaacagcaagaacaataggaactacttagcttggtaccagcagaaaccaggacagcctcctaagctgctcatttactgggcatctacccgggaatccggggtccctgaccgattcagtggcagcgggtctgggacagatttcactctcaccatcgattccctgcaggctgaagatagtgcaacttattactgtcagcaacattatagtactccattcacttttggccaggggaccagactggagatcaaa

SEQ ID NO: 1426 - protein, 245 aa, Artificial
  unknown organism
QVQLVQSGAEVKRPGASMKVSCKASGYTFTNYYIHWVRQAPGQGLEWMGWINPNSGATNYAQKFQGRVTMTRDTSTSTVYMELSSLRSEDTAVYYCAKSWVSWFASWGQGTLVTVSSGGGGSGGGGSGGGGSDIVMTQSPDSLAVSLGERATINCKSSQSVLNSKNNRNYLAWYQQKPGQPPKLLIYWASTRESGVPDRFSGSGSGTDFTLTIDSLQAEDSATYYCQQHYSTPFTFGQGTRLEIK

SEQ ID NO: 1427 - DNA, 735 bp, Artificial
  unknown organism
caggtgcagctggtccagtctggggctgaggtgaagaggcctggggcctcaatgaaggtctcctgcaaggcttctgggtacaccttcaccaactactatatacactgggtgcgacaggcccctggacaaggtcttgagtggatgggttggatcaaccctaacagtggtgccacaaactatgcacagaagttccagggcagagtcaccatgaccagggacacgtccacgagcacagtctacatggagctgagcagcctgagatctgaggacacggccgtgtattactgtgcgaaatcctgggtctcctggtttgcttcctggggtcaaggaaccttggtcaccgtctcctcaggtggtggtggttctggcggcggcggctccggtggtggtggttctgacatcgtgatgacccagtctccagactccctggctgtgtctctgggcgagagggccaccatcaactgcaagtccagccagagtgttttaaacagcaagaacaataggaactacttagcttggtaccagcagaaaccaggacagcctcctaagctgctcatttactgggcatctacccgggaatccggggtccctgaccgattcagtggcagcgggtctgggacagatttcactctcaccatcgattccctgcaggctgaagatagtgcaacttattactgtcagcaacattatagtactccattcacttttggccaggggaccagactggagatcaaa

SEQ ID NO: 1428 - protein, 500 aa, Artificial
  unknown organism
QVQLVQSGAEVKRPGASMKVSCKASGYTFTNYYIHWVRQAPGQGLEWMGWINPNSGATNYAQKFQGRVTMTRDTSTSTVYMELSSLRSEDTAVYYCAKSWVSWFASWGQGTLVTVSSGGGGSGGGGSGGGGSDIVMTQSPDSLAVSLGERATINCKSSQSVLNSKNNRNYLAWYQQKPGQPPKLLIYWASTRESGVPDRFSGSGSGTDFTLTIDSLQAEDSATYYCQQHYSTPFTFGQGTRLEIKSGGGGSEVQLVESGGGLVQPGGSLKLSCAASGFTFNKYAMNWVRQAPGKGLEWVARIRSKYNNYATYYADSVKDRFTISRDDSKNTAYLQMNNLKTEDTAVYYCVRHGNFGNSYISYWAYWGQGTLVTVSSGGGGSGGGGSGGGGSQTVVTQEPSLTVSPGGTVTLTCGSSTGAVTSGNYPNWVQQKPGQAPRGLIGGTKFLAPGTPARFSGSLLGGKAALTLSGVQPEDEAEYYCVLWYSNRWVFGGGTKLTVL

SEQ ID NO: 1429 - DNA, 1500 bp, Artificial
  unknown organism
caggtgcagctggtccagtctggggctgaggtgaagaggcctggggcctcaatgaaggtctcctgcaaggcttctgggtacaccttcaccaactactatatacactgggtgcgacaggcccctggacaaggtcttgagtggatgggttggatcaaccctaacagtggtgccacaaactatgcacagaagttccagggcagagtcaccatgaccagggacacgtccacgagcacagtctacatggagctgagcagcctgagatctgaggacacggccgtgtattactgtgcgaaatcctgggtctcctggtttgcttcctggggtcaaggaaccttggtcaccgtctcctcaggtggtggtggttctggcggcggcggctccggtggtggtggttctgacatcgtgatgacccagtctccagactccctggctgtgtctctgggcgagagggccaccatcaactgcaagtccagccagagtgttttaaacagcaagaacaataggaactacttagcttggtaccagcagaaaccaggacagcctcctaagctgctcatttactgggcatctacccgggaatccggggtccctgaccgattcagtggcagcgggtctgggacagatttcactctcaccatcgattccctgcaggctgaagatagtgcaacttattactgtcagcaacattatagtactccattcacttttggccaggggaccagactggagatcaaatccggaggtggtggatccgaggtgcagctggtcgagtctggaggaggattggtgcagcctggagggtcattgaaactctcatgtgcagcctctggattcaccttcaataagtacgccatgaactgggtccgccaggctccaggaaagggtttggaatgggttgctcgcataagaagtaaatataataattatgcaacatattatgccgattcagtgaaagacaggttcaccatctccagagatgattcaaaaaacactgcctatctacaaatgaacaacttgaaaactgaggacactgccgtgtactactgtgtgagacatgggaacttcggtaatagctacatatcctactgggcttactggggccaagggactctggtcaccgtctcctcaggtggtggtggttctggcggcggcggctccggtggtggtggttctcagactgttgtgactcaggaaccttcactcaccgtatcacctggtggaacagtcacactcacttgtggctcctcgactggggctgttacatctggcaactacccaaactgggtccaacaaaaaccaggtcaggcaccccgtggtctaataggtgggactaagttcctcgcccccggtactcctgccagattctcaggctccctgcttggaggcaaggctgccctcaccctctcaggggtacagccagaggatgaggcagaatattactgtgttctatggtacagcaaccgctgggtgttcggtggaggaaccaaactgactgtccta

SEQ ID NO: 1430 - protein, 117 aa, Artificial; identical to SEQ ID NO: 207
  unknown organism

SEQ ID NO: 1431 - protein, 5 aa, Artificial
  unknown organism
NYYIH

SEQ ID NO: 1432 - protein, 17 aa, Artificial
  unknown organism
WINPNSGATNYAQKFQG

SEQ ID NO: 1433 - protein, 8 aa, Artificial
  unknown organism
SWVSWFAS

SEQ ID NO: 1434 - DNA, 351 bp, Artificial; identical to SEQ ID NO: 208
  unknown organism

SEQ ID NO: 1435 - protein, 113 aa, Artificial
  unknown organism
DIVMTQSPDSLAVSLGERATINCKSSQSVLNSKNNRNYLAWYQQKPGQPPKLLIYWASTRESGVPDRFSGSGSGTDFTLTIDVLQPEDIATYYCQQHYSTPFTFGQGTRLEIK

SEQ ID NO: 1436 - protein, 17 aa, Artificial
  unknown organism
KSSQSVLNSKNNRNYLA

SEQ ID NO: 1437 - protein, 7 aa, Artificial
  unknown organism
WASTRES

SEQ ID NO: 1438 - protein, 9 aa, Artificial
  unknown organism
QQHYSTPFT

SEQ ID NO: 1439 - DNA, 339 bp, Artificial
  unknown organism
gacatcgtgatgacccagtctccagactccctggctgtgtctctgggcgagagggccaccatcaactgcaagtccagccagagtgttttaaacagcaagaacaataggaactacttagcttggtaccagcagaaaccaggacagcctcctaagctgctcatttactgggcatctacccgggaatccggggtccctgaccgattcagtggcagcgggtctgggacagatttcactctcaccatcgatgtcctgcagcctgaagatattgcaacttattactgtcagcaacattatagtactccattcacttttggccaggggaccagactggagatcaaa

SEQ ID NO: 1440 - protein, 245 aa, Artificial
  unknown organism
QVQLVQSGAEVKRPGASMKVSCKASGYTFTNYYIHWVRQAPGQGLEWMGWINPNSGATNYAQKFQGRVTMTRDTSTSTVYMELSSLRSEDTAVYYCAKSWVSWFASWGQGTLVTVSSGGGGSGGGGSGGGGSDIVMTQSPDSLAVSLGERATINCKSSQSVLNSKNNRNYLAWYQQKPGQPPKLLIYWASTRESGVPDRFSGSGSGTDFTLTIDVLQPEDIATYYCQQHYSTPFTFGQGTRLEIK

SEQ ID NO: 1441 - DNA, 735 bp, Artificial
  unknown organism
caggtgcagctggtccagtctggggctgaggtgaagaggcctggggcctcaatgaaggtctcctgcaaggcttctgggtacaccttcaccaactactatatacactgggtgcgacaggcccctggacaaggtcttgagtggatgggttggatcaaccctaacagtggtgccacaaactatgcacagaagttccagggcagagtcaccatgaccagggacacgtccacgagcacagtctacatggagctgagcagcctgagatctgaggacacggccgtgtattactgtgcgaaatcctgggtctcctggtttgcttcctggggtcaaggaaccttggtcaccgtctcctcaggtggtggtggttctggcggcggcggctccggtggtggtggttctgacatcgtgatgacccagtctccagactccctggctgtgtctctgggcgagagggccaccatcaactgcaagtccagccagagtgttttaaacagcaagaacaataggaactacttagcttggtaccagcagaaaccaggacagcctcctaagctgctcatttactgggcatctacccgggaatccggggtccctgaccgattcagtggcagcgggtctgggacagatttcactctcaccatcgatgtcctgcagcctgaagatattgcaacttattactgtcagcaacattatagtactccattcacttttggccaggggaccagactggagatcaaa

SEQ ID NO: 1442 - protein, 500 aa, Artificial
  unknown organism
QVQLVQSGAEVKRPGASMKVSCKASGYTFTNYYIHWVRQAPGQGLEWMGWINPNSGATNYAQKFQGRVTMTRDTSTSTVYMELSSLRSEDTAVYYCAKSWVSWFASWGQGTLVTVSSGGGGSGGGGSGGGGSDIVMTQSPDSLAVSLGERATINCKSSQSVLNSKNNRNYLAWYQQKPGQPPKLLIYWASTRESGVPDRFSGSGSGTDFTLTIDVLQPEDIATYYCQQHYSTPFTFGQGTRLEIKSGGGGSEVQLVESGGGLVQPGGSLKLSCAASGFTFNKYAMNWVRQAPGKGLEWVARIRSKYNNYATYYADSVKDRFTISRDDSKNTAYLQMNNLKTEDTAVYYCVRHGNFGNSYISYWAYWGQGTLVTVSSGGGGSGGGGSGGGGSQTVVTQEPSLTVSPGGTVTLTCGSSTGAVTSGNYPNWVQQKPGQAPRGLIGGTKFLAPGTPARFSGSLLGGKAALTLSGVQPEDEAEYYCVLWYSNRWVFGGGTKLTVL

SEQ ID NO: 1443 - DNA, 1500 bp, Artificial
  unknown organism
caggtgcagctggtccagtctggggctgaggtgaagaggcctggggcctcaatgaaggtctcctgcaaggcttctgggtacaccttcaccaactactatatacactgggtgcgacaggcccctggacaaggtcttgagtggatgggttggatcaaccctaacagtggtgccacaaactatgcacagaagttccagggcagagtcaccatgaccagggacacgtccacgagcacagtctacatggagctgagcagcctgagatctgaggacacggccgtgtattactgtgcgaaatcctgggtctcctggtttgcttcctggggtcaaggaaccttggtcaccgtctcctcaggtggtggtggttctggcggcggcggctccggtggtggtggttctgacatcgtgatgacccagtctccagactccctggctgtgtctctgggcgagagggccaccatcaactgcaagtccagccagagtgttttaaacagcaagaacaataggaactacttagcttggtaccagcagaaaccaggacagcctcctaagctgctcatttactgggcatctacccgggaatccggggtccctgaccgattcagtggcagcgggtctgggacagatttcactctcaccatcgatgtcctgcagcctgaagatattgcaacttattactgtcagcaacattatagtactccattcacttttggccaggggaccagactggagatcaaatccggaggtggtggatccgaggtgcagctggtcgagtctggaggaggattggtgcagcctggagggtcattgaaactctcatgtgcagcctctggattcaccttcaataagtacgccatgaactgggtccgccaggctccaggaaagggtttggaatgggttgctcgcataagaagtaaatataataattatgcaacatattatgccgattcagtgaaagacaggttcaccatctccagagatgattcaaaaaacactgcctatctacaaatgaacaacttgaaaactgaggacactgccgtgtactactgtgtgagacatgggaacttcggtaatagctacatatcctactgggcttactggggccaagggactctggtcaccgtctcctcaggtggtggtggttctggcggcggcggctccggtggtggtggttctcagactgttgtgactcaggaaccttcactcaccgtatcacctggtggaacagtcacactcacttgtggctcctcgactggggctgttacatctggcaactacccaaactgggtccaacaaaaaccaggtcaggcaccccgtggtctaataggtgggactaagttcctcgcccccggtactcctgccagattctcaggctccctgcttggaggcaaggctgccctcaccctctcaggggtacagccagaggatgaggcagaatattactgtgttctatggtacagcaaccgctgggtgttcggtggaggaaccaaactgactgtccta

SEQ ID NO: 1444 - protein, 117 aa, Artificial; identical to SEQ ID NO: 207
  unknown organism

SEQ ID NO: 1445 - protein, 5 aa, Artificial
  unknown organism
NYYIH

SEQ ID NO: 1446 - protein, 17 aa, Artificial
  unknown organism
WINPNSGATNYAQKFQG

SEQ ID NO: 1447 - protein, 8 aa, Artificial
  unknown organism
SWVSWFAS

SEQ ID NO: 1448 - DNA, 351 bp, Artificial; identical to SEQ ID NO: 208
  unknown organism

SEQ ID NO: 1449 - protein, 113 aa, Artificial
  unknown organism
DIVMTQSPDSLAVSLGDRATINCKSSQSVLNSKNNRNYLAWYQQKPGQPPKLLIYWASTRESGVPDRFSGSGSGTDFTLTIDSLQPEDSATYYCQQHYSTPFTFGQGTRLEIK

SEQ ID NO: 1450 - protein, 17 aa, Artificial
  unknown organism
KSSQSVLNSKNNRNYLA

SEQ ID NO: 1451 - protein, 7 aa, Artificial
  unknown organism
WASTRES

SEQ ID NO: 1452 - protein, 9 aa, Artificial
  unknown organism
QQHYSTPFT

SEQ ID NO: 1453 - DNA, 339 bp, Artificial
  unknown organism
gacatcgtgatgacccagtctccagactccctggctgtgtctctgggcgacagggccaccatcaactgcaagtccagccagagtgttttaaacagcaagaacaataggaactacttagcttggtaccagcagaaaccaggacagcctcctaagctgctcatttactgggcatctacccgggaatccggggtccctgaccgattcagtggcagcgggtctgggacagatttcactctcaccatcgattccctgcagcctgaggatagtgcaacttattactgtcagcaacattatagtactccattcacttttggccaggggaccagactggagatcaaa

SEQ ID NO: 1454 - protein, 245 aa, Artificial
  unknown organism
QVQLVQSGAEVKRPGASMKVSCKASGYTFTNYYIHWVRQAPGQGLEWMGWINPNSGATNYAQKFQGRVTMTRDTSTSTVYMELSSLRSEDTAVYYCAKSWVSWFASWGQGTLVTVSSGGGGSGGGGSGGGGSDIVMTQSPDSLAVSLGDRATINCKSSQSVLNSKNNRNYLAWYQQKPGQPPKLLIYWASTRESGVPDRFSGSGSGTDFTLTIDSLQPEDSATYYCQQHYSTPFTFGQGTRLEIK

SEQ ID NO: 1455 - DNA, 735 bp, Artificial
  unknown organism
caggtgcagctggtccagtctggggctgaggtgaagaggcctggggcctcaatgaaggtctcctgcaaggcttctgggtacaccttcaccaactactatatacactgggtgcgacaggcccctggacaaggtcttgagtggatgggttggatcaaccctaacagtggtgccacaaactatgcacagaagttccagggcagagtcaccatgaccagggacacgtccacgagcacagtctacatggagctgagcagcctgagatctgaggacacggccgtgtattactgtgcgaaatcctgggtctcctggtttgcttcctggggtcaaggaaccttggtcaccgtctcctcaggtggtggtggttctggcggcggcggctccggtggtggtggttctgacatcgtgatgacccagtctccagactccctggctgtgtctctgggcgacagggccaccatcaactgcaagtccagccagagtgttttaaacagcaagaacaataggaactacttagcttggtaccagcagaaaccaggacagcctcctaagctgctcatttactgggcatctacccgggaatccggggtccctgaccgattcagtggcagcgggtctgggacagatttcactctcaccatcgattccctgcagcctgaggatagtgcaacttattactgtcagcaacattatagtactccattcacttttggccaggggaccagactggagatcaaa

SEQ ID NO: 1456 - protein, 500 aa, Artificial
  unknown organism
QVQLVQSGAEVKRPGASMKVSCKASGYTFTNYYIHWVRQAPGQGLEWMGWINPNSGATNYAQKFQGRVTMTRDTSTSTVYMELSSLRSEDTAVYYCAKSWVSWFASWGQGTLVTVSSGGGGSGGGGSGGGGSDIVMTQSPDSLAVSLGDRATINCKSSQSVLNSKNNRNYLAWYQQKPGQPPKLLIYWASTRESGVPDRFSGSGSGTDFTLTIDSLQPEDSATYYCQQHYSTPFTFGQGTRLEIKSGGGGSEVQLVESGGGLVQPGGSLKLSCAASGFTFNKYAMNWVRQAPGKGLEWVARIRSKYNNYATYYADSVKDRFTISRDDSKNTAYLQMNNLKTEDTAVYYCVRHGNFGNSYISYWAYWGQGTLVTVSSGGGGSGGGGSGGGGSQTVVTQEPSLTVSPGGTVTLTCGSSTGAVTSGNYPNWVQQKPGQAPRGLIGGTKFLAPGTPARFSGSLLGGKAALTLSGVQPEDEAEYYCVLWYSNRWVFGGGTKLTVL

SEQ ID NO: 1457 - DNA, 1500 bp, Artificial
  unknown organism
caggtgcagctggtccagtctggggctgaggtgaagaggcctggggcctcaatgaaggtctcctgcaaggcttctgggtacaccttcaccaactactatatacactgggtgcgacaggcccctggacaaggtcttgagtggatgggttggatcaaccctaacagtggtgccacaaactatgcacagaagttccagggcagagtcaccatgaccagggacacgtccacgagcacagtctacatggagctgagcagcctgagatctgaggacacggccgtgtattactgtgcgaaatcctgggtctcctggtttgcttcctggggtcaaggaaccttggtcaccgtctcctcaggtggtggtggttctggcggcggcggctccggtggtggtggttctgacatcgtgatgacccagtctccagactccctggctgtgtctctgggcgacagggccaccatcaactgcaagtccagccagagtgttttaaacagcaagaacaataggaactacttagcttggtaccagcagaaaccaggacagcctcctaagctgctcatttactgggcatctacccgggaatccggggtccctgaccgattcagtggcagcgggtctgggacagatttcactctcaccatcgattccctgcagcctgaggatagtgcaacttattactgtcagcaacattatagtactccattcacttttggccaggggaccagactggagatcaaatccggaggtggtggatccgaggtgcagctggtcgagtctggaggaggattggtgcagcctggagggtcattgaaactctcatgtgcagcctctggattcaccttcaataagtacgccatgaactgggtccgccaggctccaggaaagggtttggaatgggttgctcgcataagaagtaaatataataattatgcaacatattatgccgattcagtgaaagacaggttcaccatctccagagatgattcaaaaaacactgcctatctacaaatgaacaacttgaaaactgaggacactgccgtgtactactgtgtgagacatgggaacttcggtaatagctacatatcctactgggcttactggggccaagggactctggtcaccgtctcctcaggtggtggtggttctggcggcggcggctccggtggtggtggttctcagactgttgtgactcaggaaccttcactcaccgtatcacctggtggaacagtcacactcacttgtggctcctcgactggggctgttacatctggcaactacccaaactgggtccaacaaaaaccaggtcaggcaccccgtggtctaataggtgggactaagttcctcgcccccggtactcctgccagattctcaggctccctgcttggaggcaaggctgccctcaccctctcaggggtacagccagaggatgaggcagaatattactgtgttctatggtacagcaaccgctgggtgttcggtggaggaaccaaactgactgtccta

SEQ ID NO: 1458 - protein, 117 aa, Artificial; identical to SEQ ID NO: 207
  unknown organism

SEQ ID NO: 1459 - protein, 5 aa, Artificial
  unknown organism
NYYIH

SEQ ID NO: 1460 - protein, 17 aa, Artificial
  unknown organism
WINPNSGATNYAQKFQG

SEQ ID NO: 1461 - protein, 8 aa, Artificial
  unknown organism
SWVSWFAS

SEQ ID NO: 1462 - DNA, 351 bp, Artificial; identical to SEQ ID NO: 208
  unknown organism

SEQ ID NO: 1463 - protein, 113 aa, Artificial
  unknown organism
DIVMTQSPDSLTVSLGERATINCKSSQSVLNSKNNRNYLAWYQQKPGQPPKLLIYWASTRESGVPDRFSGSGSGTDFTLTIDSLQAEDSAIYYCQQHYSTPFTFGQGTRLEIK

SEQ ID NO: 1464 - protein, 17 aa, Artificial
  unknown organism
KSSQSVLNSKNNRNYLA

SEQ ID NO: 1465 - protein, 7 aa, Artificial
  unknown organism
WASTRES

SEQ ID NO: 1466 - protein, 9 aa, Artificial
  unknown organism
QQHYSTPFT

SEQ ID NO: 1467 - DNA, 339 bp, Artificial
  unknown organism
gacatcgtgatgacccagtctccagactccctgactgtgtctctgggcgagagggccaccatcaactgcaagtccagccagagtgttttaaacagcaagaacaataggaactacttagcttggtaccagcagaaaccaggacagcctcctaagctgctcatttactgggcatctacccgggaatccggggtccctgaccgattcagtggcagcgggtctgggacagatttcactctcaccatcgattccctgcaggctgaagatagtgcaatttattactgtcagcaacattatagtactccattcacttttggccaggggaccagactggagatcaaa

SEQ ID NO: 1468 - protein, 245 aa, Artificial
  unknown organism
QVQLVQSGAEVKRPGASMKVSCKASGYTFTNYYIHWVRQAPGQGLEWMGWINPNSGATNYAQKFQGRVTMTRDTSTSTVYMELSSLRSEDTAVYYCAKSWVSWFASWGQGTLVTVSSGGGGSGGGGSGGGGSDIVMTQSPDSLTVSLGERATINCKSSQSVLNSKNNRNYLAWYQQKPGQPPKLLIYWASTRESGVPDRFSGSGSGTDFTLTIDSLQAEDSAIYYCQQHYSTPFTFGQGTRLEIK

SEQ ID NO: 1469 - DNA, 735 bp, Artificial
  unknown organism
caggtgcagctggtccagtctggggctgaggtgaagaggcctggggcctcaatgaaggtctcctgcaaggcttctgggtacaccttcaccaactactatatacactgggtgcgacaggcccctggacaaggtcttgagtggatgggttggatcaaccctaacagtggtgccacaaactatgcacagaagttccagggcagagtcaccatgaccagggacacgtccacgagcacagtctacatggagctgagcagcctgagatctgaggacacggccgtgtattactgtgcgaaatcctgggtctcctggtttgcttcctggggtcaaggaaccttggtcaccgtctcctcaggtggtggtggttctggcggcggcggctccggtggtggtggttctgacatcgtgatgacccagtctccagactccctgactgtgtctctgggcgagagggccaccatcaactgcaagtccagccagagtgttttaaacagcaagaacaataggaactacttagcttggtaccagcagaaaccaggacagcctcctaagctgctcatttactgggcatctacccgggaatccggggtccctgaccgattcagtggcagcgggtctgggacagatttcactctcaccatcgattccctgcaggctgaagatagtgcaatttattactgtcagcaacattatagtactccattcacttttggccaggggaccagactggagatcaaa

SEQ ID NO: 1470 - protein, 500 aa, Artificial
  unknown organism
QVQLVQSGAEVKRPGASMKVSCKASGYTFTNYYIHWVRQAPGQGLEWMGWINPNSGATNYAQKFQGRVTMTRDTSTSTVYMELSSLRSEDTAVYYCAKSWVSWFASWGQGTLVTVSSGGGGSGGGGSGGGGSDIVMTQSPDSLTVSLGERATINCKSSQSVLNSKNNRNYLAWYQQKPGQPPKLLIYWASTRESGVPDRFSGSGSGTDFTLTIDSLQAEDSAIYYCQQHYSTPFTFGQGTRLEIKSGGGGSEVQLVESGGGLVQPGGSLKLSCAASGFTFNKYAMNWVRQAPGKGLEWVARIRSKYNNYATYYADSVKDRFTISRDDSKNTAYLQMNNLKTEDTAVYYCVRHGNFGNSYISYWAYWGQGTLVTVSSGGGGSGGGGSGGGGSQTVVTQEPSLTVSPGGTVTLTCGSSTGAVTSGNYPNWVQQKPGQAPRGLIGGTKFLAPGTPARFSGSLLGGKAALTLSGVQPEDEAEYYCVLWYSNRWVFGGGTKLTVL

SEQ ID NO: 1471 - DNA, 1500 bp, Artificial
  unknown organism
caggtgcagctggtccagtctggggctgaggtgaagaggcctggggcctcaatgaaggtctcctgcaaggcttctgggtacaccttcaccaactactatatacactgggtgcgacaggcccctggacaaggtcttgagtggatgggttggatcaaccctaacagtggtgccacaaactatgcacagaagttccagggcagagtcaccatgaccagggacacgtccacgagcacagtctacatggagctgagcagcctgagatctgaggacacggccgtgtattactgtgcgaaatcctgggtctcctggtttgcttcctggggtcaaggaaccttggtcaccgtctcctcaggtggtggtggttctggcggcggcggctccggtggtggtggttctgacatcgtgatgacccagtctccagactccctgactgtgtctctgggcgagagggccaccatcaactgcaagtccagccagagtgttttaaacagcaagaacaataggaactacttagcttggtaccagcagaaaccaggacagcctcctaagctgctcatttactgggcatctacccgggaatccggggtccctgaccgattcagtggcagcgggtctgggacagatttcactctcaccatcgattccctgcaggctgaagatagtgcaatttattactgtcagcaacattatagtactccattcacttttggccaggggaccagactggagatcaaatccggaggtggtggatccgaggtgcagctggtcgagtctggaggaggattggtgcagcctggagggtcattgaaactctcatgtgcagcctctggattcaccttcaataagtacgccatgaactgggtccgccaggctccaggaaagggtttggaatgggttgctcgcataagaagtaaatataataattatgcaacatattatgccgattcagtgaaagacaggttcaccatctccagagatgattcaaaaaacactgcctatctacaaatgaacaacttgaaaactgaggacactgccgtgtactactgtgtgagacatgggaacttcggtaatagctacatatcctactgggcttactggggccaagggactctggtcaccgtctcctcaggtggtggtggttctggcggcggcggctccggtggtggtggttctcagactgttgtgactcaggaaccttcactcaccgtatcacctggtggaacagtcacactcacttgtggctcctcgactggggctgttacatctggcaactacccaaactgggtccaacaaaaaccaggtcaggcaccccgtggtctaataggtgggactaagttcctcgcccccggtactcctgccagattctcaggctccctgcttggaggcaaggctgccctcaccctctcaggggtacagccagaggatgaggcagaatattactgtgttctatggtacagcaaccgctgggtgttcggtggaggaaccaaactgactgtccta

SEQ ID NO: 1472 - protein, 117 aa, Artificial; identical to SEQ ID NO: 207
  unknown organism

SEQ ID NO: 1473 - protein, 5 aa, Artificial
  unknown organism
NYYIH

SEQ ID NO: 1474 - protein, 17 aa, Artificial
  unknown organism
WINPNSGATNYAQKFQG

SEQ ID NO: 1475 - protein, 8 aa, Artificial
  unknown organism
SWVSWFAS

SEQ ID NO: 1476 - DNA, 351 bp, Artificial; identical to SEQ ID NO: 208
  unknown organism

SEQ ID NO: 1477 - protein, 113 aa, Artificial; identical to SEQ ID NO: 1347
  unknown organism

SEQ ID NO: 1478 - protein, 17 aa, Artificial
  unknown organism
KSSQSVLSSSNNKNYLN

SEQ ID NO: 1479 - protein, 7 aa, Artificial
  unknown organism
WASTRES

SEQ ID NO: 1480 - protein, 9 aa, Artificial
  unknown organism
QQHFNTPFA

SEQ ID NO: 1481 - DNA, 339 bp, Artificial; identical to SEQ ID NO: 1351
  unknown organism

SEQ ID NO: 1482 - protein, 245 aa, Artificial
  unknown organism
QVQLVQSGAEVKRPGASMKVSCKASGYTFTNYYIHWVRQAPGQGLEWMGWINPNSGATNYAQKFQGRVTMTRDTSTSTVYMELSSLRSEDTAVYYCAKSWVSWFASWGQGTLVTVSSGGGGSGGGGSGGGGSDIVMTQSPDSLAVSLGERATINCKSSQSVLSSSNNKNYLNWYQQKPGQPPKLLIYWASTRESGVPDRFSGSGSGTDFTLTISSLQAEDVAVYYCQQHFNTPFAFGQGTKLEIK

SEQ ID NO: 1483 - DNA, 735 bp, Artificial
  unknown organism
caggtgcagctggtccagtctggggctgaggtgaagaggcctggggcctcaatgaaggtctcctgcaaggcttctgggtacaccttcaccaactactatatacactgggtgcgacaggcccctggacaaggtcttgagtggatgggttggatcaaccctaacagtggtgccacaaactatgcacagaagttccagggcagagtcaccatgaccagggacacgtccacgagcacagtctacatggagctgagcagcctgagatctgaggacacggccgtgtattactgtgcgaaatcctgggtctcctggtttgcttcctggggtcaaggaaccttggtcaccgtctcctcaggtggtggtggttctggcggcggcggctccggtggtggtggttctgacatcgtgatgacacagtctccagactccctggctgtgtctctgggcgagagggccaccatcaactgcaagtccagccagagtgtcttatccagctccaacaataagaactacttaaattggtaccagcagaaaccaggacagcctcctaagttgctcatttactgggcatctacccgggaatccggggtccctgaccgattcagtggcagcgggtctgggacagatttcactctcaccatcagcagcctgcaggctgaagatgtggcggtttattactgtcaacaacattttaatactccgttcgcttttggccaggggaccaagctggagatcaaa

SEQ ID NO: 1484 - protein, 500 aa, Artificial
  unknown organism
QVQLVQSGAEVKRPGASMKVSCKASGYTFTNYYIHWVRQAPGQGLEWMGWINPNSGATNYAQKFQGRVTMTRDTSTSTVYMELSSLRSEDTAVYYCAKSWVSWFASWGQGTLVTVSSGGGGSGGGGSGGGGSDIVMTQSPDSLAVSLGERATINCKSSQSVLSSSNNKNYLNWYQQKPGQPPKLLIYWASTRESGVPDRFSGSGSGTDFTLTISSLQAEDVAVYYCQQHFNTPFAFGQGTKLEIKSGGGGSEVQLVESGGGLVQPGGSLKLSCAASGFTFNKYAMNWVRQAPGKGLEWVARIRSKYNNYATYYADSVKDRFTISRDDSKNTAYLQMNNLKTEDTAVYYCVRHGNFGNSYISYWAYWGQGTLVTVSSGGGGSGGGGSGGGGSQTVVTQEPSLTVSPGGTVTLTCGSSTGAVTSGNYPNWVQQKPGQAPRGLIGGTKFLAPGTPARFSGSLLGGKAALTLSGVQPEDEAEYYCVLWYSNRWVFGGGTKLTVL

SEQ ID NO: 1485 - DNA, 1500 bp, Artificial
  unknown organism
caggtgcagctggtccagtctggggctgaggtgaagaggcctggggcctcaatgaaggtctcctgcaaggcttctgggtacaccttcaccaactactatatacactgggtgcgacaggcccctggacaaggtcttgagtggatgggttggatcaaccctaacagtggtgccacaaactatgcacagaagttccagggcagagtcaccatgaccagggacacgtccacgagcacagtctacatggagctgagcagcctgagatctgaggacacggccgtgtattactgtgcgaaatcctgggtctcctggtttgcttcctggggtcaaggaaccttggtcaccgtctcctcaggtggtggtggttctggcggcggcggctccggtggtggtggttctgacatcgtgatgacacagtctccagactccctggctgtgtctctgggcgagagggccaccatcaactgcaagtccagccagagtgtcttatccagctccaacaataagaactacttaaattggtaccagcagaaaccaggacagcctcctaagttgctcatttactgggcatctacccgggaatccggggtccctgaccgattcagtggcagcgggtctgggacagatttcactctcaccatcagcagcctgcaggctgaagatgtggcggtttattactgtcaacaacattttaatactccgttcgcttttggccaggggaccaagctggagatcaaatccggaggtggtggatccgaggtgcagctggtcgagtctggaggaggattggtgcagcctggagggtcattgaaactctcatgtgcagcctctggattcaccttcaataagtacgccatgaactgggtccgccaggctccaggaaagggtttggaatgggttgctcgcataagaagtaaatataataattatgcaacatattatgccgattcagtgaaagacaggttcaccatctccagagatgattcaaaaaacactgcctatctacaaatgaacaacttgaaaactgaggacactgccgtgtactactgtgtgagacatgggaacttcggtaatagctacatatcctactgggcttactggggccaagggactctggtcaccgtctcctcaggtggtggtggttctggcggcggcggctccggtggtggtggttctcagactgttgtgactcaggaaccttcactcaccgtatcacctggtggaacagtcacactcacttgtggctcctcgactggggctgttacatctggcaactacccaaactgggtccaacaaaaaccaggtcaggcaccccgtggtctaataggtgggactaagttcctcgcccccggtactcctgccagattctcaggctccctgcttggaggcaaggctgccctcaccctctcaggggtacagccagaggatgaggcagaatattactgtgttctatggtacagcaaccgctgggtgttcggtggaggaaccaaactgactgtccta

SEQ ID NO: 1486 - protein, 5 aa, Artificial
  unknown organism
DAWMD

SEQ ID NO: 1487 - protein, 19 aa, Artificial
  unknown organism
EIRNKANNHATYYDESVKG

SEQ ID NO: 1488 - protein, 4 aa, Artificial
  unknown organism
EFAN

SEQ ID NO: 1489 - protein, 16 aa, Artificial
  unknown organism
RSSQNLVHNNGNTYLY

SEQ ID NO: 1490 - protein, 7 aa, Artificial
  unknown organism
RASIRFS

SEQ ID NO: 1491 - protein, 9 aa, Artificial
  unknown organism
FQGTHVPWT

SEQ ID NO: 1492 - protein, 5 aa, Artificial
  unknown organism
NYWMN

SEQ ID NO: 1493 - protein, 19 aa, Artificial
  unknown organism
EIRLKSNNYATHYAESVKG

SEQ ID NO: 1494 - protein, 6 aa, Artificial
  unknown organism
VGQFAY

SEQ ID NO: 1495 - protein, 14 aa, Artificial
  unknown organism
RSSTGAVTTSNYAN

SEQ ID NO: 1496 - protein, 7 aa, Artificial
  unknown organism
GTNNRAP

SEQ ID NO: 1497 - protein, 9 aa, Artificial
  unknown organism
ALWYSNHWV

SEQ ID NO: 1498 - DNA, 2328 bp, Artificial
  unknown organism
atgacaccgggcacccagtctcctttcttcctgctgctgctcctcacagtgcttacagttgttacaggttctggtcatgcaagctctaccccaggtggagaaaaggagacttcggctacccagagaagttcagtgcccagctctactgagaagaatgctgtgagtatgaccagcagcgtactctccagccacagccccggttcaggctcctccaccactcagggacaggatgtcactctggccccggccacggaaccagcttcaggttcagctgccacctggggacaggatgtcacctcggtcccagtcaccaggccagccctgggctccaccaccccgccagcccacgatgtcacctcagccccggacaacaagccagccccgggctccaccgcccccccagcccacggtgtcacctcggccccggacaccaggccggctccgggctccaccgcccccccagcccacggtgtcacctcggccccggacaccaggccggctccgggctccaccgcccccccagcccacggtgtcacctcggccccggacaccaggccggctccgggctccaccgcccccccagcccacggtgtcacctcggccccggacaccaggccggctccgggctccaccgcccccccagcccacggtgtcacctcggccccggacaccaggccggctccgggctccaccgcccccccagcccacggtgtcacctcggccccggacaccaggccggctccgggctccaccgcccccccagcccacggtgtcacctcggccccggacaccaggccggctccgggctccaccgcccccccagcccacggtgtcacctcggccccggacaccaggccggctccgggctccaccgcccccccagcccacggtgtcacctcggccccggacaccaggccggctccgggctccaccgcccccccagcccacggtgtcacctcggccccggacaccaggccggctccgggctccaccgcccccccagcccacggtgtcacctcggccccggacaccaggccggctccgggctccaccgcccccccagcccacggtgtcacctcggccccggacaccaggccggctccgggctccaccgcccccccagcccacggtgtcacctcggccccggacaccaggccggctccgggctccaccgcccccccagcccacggtgtcacctcggccccggacaccaggccggctccgggctccaccgcccccccagcccacggtgtcacctcggccccggacaccaggccggctccgggctccaccgcccccccagcccacggtgtcacctcggccccggacaccaggccggctccgggctccaccgcccccccagcccatggtgtcacctcggccccggacaacaggcccgccttgggctccaccgcccctccagtccacaatgtcacctcggcctcaggctctgcatcaggctcagcttctactctggtgcacaacggcacctctgccagggctaccacaaccccagccagcaagagcactccattctcaattcccagccaccactctgatactcctaccacccttgccagccatagcaccaagactgatgccagtagcactcaccatagcacggtacctcctctcacctcctccaatcacagcacttctccccagttgtctactggggtctctttctttttcctgtcttttcacatttcaaacctccagtttaattcctctctggaagatcccagcaccgactactaccaagagctgcagagagacatttctgaaatgtttttgcagatttataaacaagggggttttctgggcctctccaatattaagttcaggccaggatctgtggtggtacaattgactctggccttccgagaaggtaccatcaatgtccacgacgtggagacacagttcaatcagtataaaacggaagcagcctctcgatataacctgacgatctcagacgtcagcgtgagtgatgtgccatttcctttctctgcccagtctggggctggggtgccaggctggggcatcgcgctgctggtgctggtctgtgttctggttgcgctggccattgtctatctcattgccttggctgtctgtcagtgccgccgaaagaactacgggcagctggacatctttccagcccgcgatacctaccatcctatgagcgagtaccccacctaccacacccatgggcgctatgtgccccctagcagtaccgatcgtagcccctatgagaaggtttctgcaggtaatggtggcagcagcctctcttacacaaacccagcagtggcagccacttctgccaacttgtag

SEQ ID NO: 1499 - protein, 775 aa, Artificial
  unknown organism
MTPGTQSPFFLLLLLTVLTVVTGSGHASSTPGGEKETSATQRSSVPSSTEKNAVSMTSSVLSSHSPGSGSSTTQGQDVTLAPATEPASGSAATWGQDVTSVPVTRPALGSTTPPAHDVTSAPDNKPAPGSTAPPAHGVTSAPDTRPAPGSTAPPAHGVTSAPDTRPAPGSTAPPAHGVTSAPDTRPAPGSTAPPAHGVTSAPDTRPAPGSTAPPAHGVTSAPDTRPAPGSTAPPAHGVTSAPDTRPAPGSTAPPAHGVTSAPDTRPAPGSTAPPAHGVTSAPDTRPAPGSTAPPAHGVTSAPDTRPAPGSTAPPAHGVTSAPDTRPAPGSTAPPAHGVTSAPDTRPAPGSTAPPAHGVTSAPDTRPAPGSTAPPAHGVTSAPDTRPAPGSTAPPAHGVTSAPDTRPAPGSTAPPAHGVTSAPDTRPAPGSTAPPAHGVTSAPDTRPAPGSTAPPAHGVTSAPDNRPALGSTAPPVHNVTSASGSASGSASTLVHNGTSARATTTPASKSTPFSIPSHHSDTPTTLASHSTKTDASSTHHSTVPPLTSSNHSTSPQLSTGVSFFFLSFHISNLQFNSSLEDPSTDYYQELQRDISEMFLQIYKQGGFLGLSNIKFRPGSVVVQLTLAFREGTINVHDVETQFNQYKTEAASRYNLTISDVSVSDVPFPFSAQSGAGVPGWGIALLVLVCVLVALAIVYLIALAVCQCRRKNYGQLDIFPARDTYHPMSEYPTYHTHGRYVPPSSTDRSPYEKVSAGNGGSSLSYTNPAVAATSANL

SEQ ID NO: 1500 - protein, 497 aa, Artificial
  unknown organism
QVQLVQSGAEVKKPGASVKISCKTSGYTFTEYTIHWVRQAPGKRLEWIGGIDPNNGGTMYNQKFKGWVTLTRDTSASTAYMELSSLRSEDTAVYYCTRAEAMDYWGQGTTVTVSSGGGGSGGGGSGGGGSDVVMTQSPLSLPVTLGQPASISCRSSESLVYRDGSTYLSWFHQRPGQSPRRLIYKVSNRDSGVPDRFSGSGSGTEFTLKISRVEAEDVGVYYCMQHTFWPWTFGQGTKVDIKSGGGGSEVQLVESGGGLVQPGGSLKLSCAASGFTFNKYAMNWVRQAPGKGLEWVARIRSKYNNYATYYADSVKDRFTISRDDSKNTAYLQMNNLKTEDTAVYYCVRHGNFGNSYISYWAYWGQGTLVTVSSGGGGSGGGGSGGGGSQTVVTQEPSLTVSPGGTVTLTCGSSTGAVTSGYYPNWVQQKPGQAPRGLIGGTKFLAPGTPARFSGSLLGGKAALTLSGVQPEDEAEYYCALWYSNRWVFGGGTKLTVL

SEQ ID NO: 1501 - DNA, 1491 bp, Artificial
  unknown organism
caggtgcagctggtccagtctggagctgaagtgaagaagcctggggcttcagtgaagatatcctgcaagacttctggatacacattcactgaatacaccatacactgggtgaggcaggcccctggaaagagacttgagtggattggaggtattgatcctaacaatggtggtaccatgtataaccaaaaattcaagggctgggtcacattaactcgtgacacgtctgccagcacagcctacatggagctgagcagtctgaggtctgaggatactgcagtctattactgcacaagagcagaggctatggactactggggtcaaggaaccacggtcaccgtctcctcaggtggtggtggttctggcggcggcggctccggtggtggtggttctgatgtcgtgatgactcagtctccactctccctgcccgtcacccttggacagccggcctccatctcctgcaggtctagtgaaagtctcgtttacagggatggaagcacgtacttgagttggtttcaccagaggcccggccaatccccaaggcgcctaatttataaggtctctaaccgggactctggggtcccagacagattcagcggcagtgggtcaggcactgagttcacactgaaaatcagcagggtggaggctgaggatgttggggtttattactgcatgcaacatacattctggccttggactttcggccaagggaccaaagtggatatcaaatccggaggtggtggatccgaggtgcagctggtcgagtctggaggaggattggtgcagcctggagggtcattgaaactctcatgtgcagcctctggattcaccttcaataagtacgccatgaactgggtccgccaggctccaggaaagggtttggaatgggttgctcgcataagaagtaaatataataattatgcaacatattatgccgattcagtgaaagacaggttcaccatctccagagatgattcaaaaaacactgcctatctacaaatgaacaacttgaaaactgaggacactgccgtgtactactgtgtgagacatgggaacttcggtaatagctacatatcctactgggcttactggggccaagggactctggtcaccgtctcctcaggtggtggtggttctggcggcggcggctccggtggtggtggttctcagactgttgtgactcaggaaccttcactcaccgtatcacctggtggaacagtcacactcacttgtggctcctcgactggggctgttacatctggctactacccaaactgggtccaacaaaaaccaggtcaggcaccccgtggtctaataggtgggactaagttcctcgcccccggtactcctgccagattctcaggctccctgcttggaggcaaggctgccctcaccctctcaggggtacagccagaggatgaggcagaatattactgtgctctatggtacagcaaccgctgggtgttcggtggaggaaccaaactgactgtccta

SEQ ID NO: 1502 - protein, 497 aa, Artificial
  unknown organism
QVQLVQSGAEVKKPGASVKISCKTSGYTFTEYTIHWVRQAPGKRLEWIGGIDPNNGGTMYNQKFKGWVTLTRDTSASTAYMELSSLRSEDTAVYYCTRAEAMDYWGQGTTVTVSSGGGGSGGGGSGGGGSDVVMTQSPLSLPVTLGQPASISCRSSESLVYRDGSTYLSWFHQRPGQSPRRLIYKVSNRDSGVPDRFSGSGSGTEFTLKISRVEAEDVGVYYCMQHTFWPWTFGQGTKVDIKSGGGGSEVQLVESGGGLVQPGGSLKLSCAASGFTFNSYAMNWVRQAPGKGLEWVARIRSKYNNYATYYADSVKGRFTISRDDSKNTAYLQMNNLKTEDTAVYYCVRHGNFGNSYVSWWAYWGQGTLVTVSSGGGGSGGGGSGGGGSQTVVTQEPSLTVSPGGTVTLTCGSSTGAVTSGNYPNWVQQKPGQAPRGLIGGTKFLAPGTPARFSGSLLGGKAALTLSGVQPEDEAEYYCVLWYSNRWVFGGGTKLTVL

SEQ ID NO: 1503 - DNA, 1491 bp, Artificial
  unknown organism
caggtgcagctggtccagtctggagctgaagtgaagaagcctggggcttcagtgaagatatcctgcaagacttctggatacacattcactgaatacaccatacactgggtgaggcaggcccctggaaagagacttgagtggattggaggtattgatcctaacaatggtggtaccatgtataaccaaaaattcaagggctgggtcacattaactcgtgacacgtctgccagcacagcctacatggagctgagcagtctgaggtctgaggatactgcagtctattactgcacaagagcagaggctatggactactggggtcaaggaaccacggtcaccgtctcctcaggtggtggtggttctggcggcggcggctccggtggtggtggttctgatgtcgtgatgactcagtctccactctccctgcccgtcacccttggacagccggcctccatctcctgcaggtctagtgaaagtctcgtttacagggatggaagcacgtacttgagttggtttcaccagaggcccggccaatccccaaggcgcctaatttataaggtctctaaccgggactctggggtcccagacagattcagcggcagtgggtcaggcactgagttcacactgaaaatcagcagggtggaggctgaggatgttggggtttattactgcatgcaacatacattctggccttggactttcggccaagggaccaaagtggatatcaaatccggaggtggtggatccgaggtgcagctggtcgagtctggaggaggattggtgcagcctggagggtcattgaaactctcatgtgcagcctctggattcaccttcaatagctacgccatgaactgggtccgccaggctccaggaaagggtttggaatgggttgctcgcataagaagtaaatataataattatgcaacatattatgccgattcagtgaaaggcaggttcaccatctccagagatgattcaaaaaacactgcctatctacaaatgaacaacttgaaaactgaggacactgccgtgtactactgtgtgagacatgggaacttcggtaatagctacgtttcctggtgggcttactggggccaagggactctggtcaccgtctcctcaggtggtggtggttctggcggcggcggctccggtggtggtggttctcagactgttgtgactcaggaaccttcactcaccgtatcacctggtggaacagtcacactcacttgtggctcctcgactggggctgttacatctggcaactacccaaactgggtccaacaaaaaccaggtcaggcaccccgtggtctaataggtgggactaagttcctcgcccccggtactcctgccagattctcaggctccctgcttggaggcaaggctgccctcaccctctcaggggtacagccagaggatgaggcagaatattactgtgttctatggtacagcaaccgctgggtgttcggtggaggaaccaaactgactgtccta

SEQ ID NO: 1504 - protein, 118 aa, Artificial
  unknown organism
EVQLVESGGGLVQPGGSLRLSCAASGFTFSSYAMSWVRQAPGKGLEWVASISSGNIIYYPDNVKGRFTISRDNSKNTLYLQMNSLRAEDTAVYYCTRGRSTYGGFDHWGQGTTVTVSS

SEQ ID NO: 1505 - protein, 5 aa, Artificial
  unknown organism
SYAMS

SEQ ID NO: 1506 - protein, 16 aa, Artificial
  unknown organism
SISSGNIIYYPDNVKG

SEQ ID NO: 1507 - protein, 10 aa, Artificial
  unknown organism
GRSTYGGFDH

SEQ ID NO: 1508 - DNA, 354 bp, Artificial
  unknown organism
gaggtgcagctggtcgaatctgggggaggccttgtgcagcctggagggtctctgaggctctcctgtgcagcctctggattcactttcagtagttatgccatgtcttgggttcgccaggctccagggaaggggctggagtgggtcgcttccattagtagtggtaatatcatctactatccagacaatgtgaagggccgattcaccatctctagagataattccaagaacaccctgtacctgcaaatgaacagtctgagggctgaggacacggccgtgtattattgtactagaggccgcagtacctacgggggatttgaccactggggccaaggcaccacagtcaccgtctcctca

SEQ ID NO: 1509 - protein, 107 aa, Artificial; identical to SEQ ID NO: 263
  unknown organism

SEQ ID NO: 1510 - protein, 11 aa, Artificial
  unknown organism
RASQSVSSNLA

SEQ ID NO: 1511 - protein, 7 aa, Artificial
  unknown organism
DASNRAT

SEQ ID NO: 1512 - protein, 9 aa, Artificial
  unknown organism
QQFGDTLWT

SEQ ID NO: 1513 - DNA, 321 bp, Artificial; identical to SEQ ID NO: 264
  unknown organism

SEQ ID NO: 1514 - protein, 240 aa, Artificial
  unknown organism
EVQLVESGGGLVQPGGSLRLSCAASGFTFSSYAMSWVRQAPGKGLEWVASISSGNIIYYPDNVKGRFTISRDNSKNTLYLQMNSLRAEDTAVYYCTRGRSTYGGFDHWGQGTTVTVSSGGGGSGGGGSGGGGSEIVLTQSPATLSVSPGERATLSCRASQSVSSNLAWYQQKPGQAPRLLIYDASNRATGIPARFSGSGSGTDFTLTISSLEPEDFAVYYCQQFGDTLWTFGQGTKVEIK

SEQ ID NO: 1515 - DNA, 720 bp, Artificial
  unknown organism
gaggtgcagctggtcgaatctgggggaggccttgtgcagcctggagggtctctgaggctctcctgtgcagcctctggattcactttcagtagttatgccatgtcttgggttcgccaggctccagggaaggggctggagtgggtcgcttccattagtagtggtaatatcatctactatccagacaatgtgaagggccgattcaccatctctagagataattccaagaacaccctgtacctgcaaatgaacagtctgagggctgaggacacggccgtgtattattgtactagaggccgcagtacctacgggggatttgaccactggggccaaggcaccacagtcaccgtctcctcaggtggtggtggttctggcggcggcggctccggtggtggtggttctgagatcgtgttgacacagtctccagccaccctgtctgtgtctccaggggaaagagccaccctctcctgcagggccagtcagagtgttagcagcaacttagcctggtaccagcagaaacctggccaggctcccaggctcctcatctatgatgcatccaacagggccactggcatcccagccaggttcagtggcagtgggtctgggacagacttcactctcaccatcagcagcctagagcctgaagattttgcagtttattactgtcagcagttcggtgatacactgtggacgttcggccaagggaccaaggtggagatcaaa

SEQ ID NO: 1516 - protein, 240 aa, Artificial
  unknown organism
EIVLTQSPATLSVSPGERATLSCRASQSVSSNLAWYQQKPGQAPRLLIYDASNRATGIPARFSGSGSGTDFTLTISSLEPEDFAVYYCQQFGDTLWTFGQGTKVEIKGGGGSGGGGSGGGGSEVQLVESGGGLVQPGGSLRLSCAASGFTFSSYAMSWVRQAPGKGLEWVASISSGNIIYYPDNVKGRFTISRDNSKNTLYLQMNSLRAEDTAVYYCTRGRSTYGGFDHWGQGTTVTVSS

SEQ ID NO: 1517 - DNA, 720 bp, Artificial
  unknown organism
gagatcgtgttgacacagtctccagccaccctgtctgtgtctccaggggaaagagccaccctctcctgcagggccagtcagagtgttagcagcaacttagcctggtaccagcagaaacctggccaggctcccaggctcctcatctatgatgcatccaacagggccactggcatcccagccaggttcagtggcagtgggtctgggacagacttcactctcaccatcagcagcctagagcctgaagattttgcagtttattactgtcagcagttcggtgatacactgtggacgttcggccaagggaccaaggtggagatcaaaggtggtggtggttctggcggcggcggctccggtggtggtggttctgaggtgcagctggtcgaatctgggggaggccttgtgcagcctggagggtctctgaggctctcctgtgcagcctctggattcactttcagtagttatgccatgtcttgggttcgccaggctccagggaaggggctggagtgggtcgcttccattagtagtggtaatatcatctactatccagacaatgtgaagggccgattcaccatctctagagataattccaagaacaccctgtacctgcaaatgaacagtctgagggctgaggacacggccgtgtattattgtactagaggccgcagtacctacgggggatttgaccactggggccaaggcaccacagtcaccgtctcctcc

SEQ ID NO: 1518 - protein, 495 aa, Artificial
  unknown organism
EVQLVESGGGLVQPGGSLRLSCAASGFTFSSYAMSWVRQAPGKGLEWVASISSGNIIYYPDNVKGRFTISRDNSKNTLYLQMNSLRAEDTAVYYCTRGRSTYGGFDHWGQGTTVTVSSGGGGSGGGGSGGGGSEIVLTQSPATLSVSPGERATLSCRASQSVSSNLAWYQQKPGQAPRLLIYDASNRATGIPARFSGSGSGTDFTLTISSLEPEDFAVYYCQQFGDTLWTFGQGTKVEIKSGGGGSEVQLVESGGGLVQPGGSLKLSCAASGFTFNKYAMNWVRQAPGKGLEWVARIRSKYNNYATYYADSVKDRFTISRDDSKNTAYLQMNNLKTEDTAVYYCVRHGNFGNSYISYWAYWGQGTLVTVSSGGGGSGGGGSGGGGSQTVVTQEPSLTVSPGGTVTLTCGSSTGAVTSGYYPNWVQQKPGQAPRGLIGGTKFLAPGTPARFSGSLLGGKAALTLSGVQPEDEAEYYCALWYSNRWVFGGGTKLTVL

SEQ ID NO: 1519 - DNA, 765 bp, Artificial
  unknown organism
tccggaggtggtggatccgaggtgcagctggtcgagtctggaggaggattggtgcagcctggagggtcattgaaactctcatgtgcagcctctggattcaccttcaataagtacgccatgaactgggtccgccaggctccaggaaagggtttggaatgggttgctcgcataagaagtaaatataataattatgcaacatattatgccgattcagtgaaagacaggttcaccatctccagagatgattcaaaaaacactgcctatctacaaatgaacaacttgaaaactgaggacactgccgtgtactactgtgtgagacatgggaacttcggtaatagctacatatcctactgggcttactggggccaagggactctggtcaccgtctcctcaggtggtggtggttctggcggcggcggctccggtggtggtggttctcagactgttgtgactcaggaaccttcactcaccgtatcacctggtggaacagtcacactcacttgtggctcctcgactggggctgttacatctggctactacccaaactgggtccaacaaaaaccaggtcaggcaccccgtggtctaataggtgggactaagttcctcgcccccggtactcctgccagattctcaggctccctgcttggaggcaaggctgccctcaccctctcaggggtacagccagaggatgaggcagaatattactgtgctctatggtacagcaaccgctgggtgttcggtggaggaaccaaactgactgtccta

SEQ ID NO: 1520 - protein, 495 aa, Artificial
  unknown organism
EVQLVESGGGLVQPGGSLRLSCAASGFTFSSYAMSWVRQAPGKGLEWVASISSGNIIYYPDNVKGRFTISRDNSKNTLYLQMNSLRAEDTAVYYCTRGRSTYGGFDHWGQGTTVTVSSGGGGSGGGGSGGGGSEIVLTQSPATLSVSPGERATLSCRASQSVSSNLAWYQQKPGQAPRLLIYDASNRATGIPARFSGSGSGTDFTLTISSLEPEDFAVYYCQQFGDTLWTFGQGTKVEIKSGGGGSEVQLVESGGGLVQPGGSLKLSCAASGFTFNSYAMNWVRQAPGKGLEWVARIRSKYNNYATYYADSVKGRFTISRDDSKNTAYLQMNNLKTEDTAVYYCVRHGNFGNSYVSWWAYWGQGTLVTVSSGGGGSGGGGSGGGGSQTVVTQEPSLTVSPGGTVTLTCGSSTGAVTSGNYPNWVQQKPGQAPRGLIGGTKFLAPGTPARFSGSLLGGKAALTLSGVQPEDEAEYYCVLWYSNRWVFGGGTKLTVL

SEQ ID NO: 1521 - DNA, 1485 bp, Artificial
  unknown organism
gaggtgcagctggtcgaatctgggggaggccttgtgcagcctggagggtctctgaggctctcctgtgcagcctctggattcactttcagtagttatgccatgtcttgggttcgccaggctccagggaaggggctggagtgggtcgcttccattagtagtggtaatatcatctactatccagacaatgtgaagggccgattcaccatctctagagataattccaagaacaccctgtacctgcaaatgaacagtctgagggctgaggacacggccgtgtattattgtactagaggccgcagtacctacgggggatttgaccactggggccaaggcaccacagtcaccgtctcctcaggtggtggtggttctggcggcggcggctccggtggtggtggttctgagatcgtgttgacacagtctccagccaccctgtctgtgtctccaggggaaagagccaccctctcctgcagggccagtcagagtgttagcagcaacttagcctggtaccagcagaaacctggccaggctcccaggctcctcatctatgatgcatccaacagggccactggcatcccagccaggttcagtggcagtgggtctgggacagacttcactctcaccatcagcagcctagagcctgaagattttgcagtttattactgtcagcagttcggtgatacactgtggacgttcggccaagggaccaaggtggagatcaaatccggaggtggtggatccgaggtgcagctggtcgagtctggaggaggattggtgcagcctggagggtcattgaaactctcatgtgcagcctctggattcaccttcaatagctacgccatgaactgggtccgccaggctccaggaaagggtttggaatgggttgctcgcataagaagtaaatataataattatgcaacatattatgccgattcagtgaaaggcaggttcaccatctccagagatgattcaaaaaacactgcctatctacaaatgaacaacttgaaaactgaggacactgccgtgtactactgtgtgagacatgggaacttcggtaatagctacgtttcctggtgggcttactggggccaagggactctggtcaccgtctcctcaggtggtggtggttctggcggcggcggctccggtggtggtggttctcagactgttgtgactcaggaaccttcactcaccgtatcacctggtggaacagtcacactcacttgtggctcctcgactggggctgttacatctggcaactacccaaactgggtccaacaaaaaccaggtcaggcaccccgtggtctaataggtgggactaagttcctcgcccccggtactcctgccagattctcaggctccctgcttggaggcaaggctgccctcaccctctcaggggtacagccagaggatgaggcagaatattactgtgttctatggtacagcaaccgctgggtgttcggtggaggaaccaaactgactgtccta

SEQ ID NO: 1522 - protein, 495 aa, Artificial
  unknown organism
EVQLVESGGGLVQPGGSLRLSCAASGFTFSSYAMSWVRQAPGKGLEWVASISSGNIIYYPDNVKGRFTISRDNSKNTLYLQMNSLRAEDTAVYYCTRGRSTYGGFDHWGQGTTVTVSSGGGGSGGGGSGGGGSEIVLTQSPATLSVSPGERATLSCRASQSVSSNLAWYQQKPGQAPRLLIYDASNRATGIPARFSGSGSGTDFTLTISSLEPEDFAVYYCQQFGDTLWTFGQGTKVEIKSGGGGSEVQLVESGGGLVQPGGSLKLSCAASGFTFNKYAMNWVRQAPGKGLEWVARIRSKYNNYATYYADSVKDRFTISRDDSKNTAYLQMNNLKTEDTAVYYCVRHGNFGNSYISYWAYWGQGTLVTVSSGGGGSGGGGSGGGGSQTVVTQEPSLTVSPGGTVTLTCGSSTGAVTSGNYPNWVQQKPGQAPRGLIGGTKFLAPGTPARFSGSLLGGKAALTLSGVQPEDEAEYYCVLWYSNRWVFGGGTKLTVL

SEQ ID NO: 1523 - DNA, 1485 bp, Artificial
  unknown organism
gaggtgcagctggtcgaatctgggggaggccttgtgcagcctggagggtctctgaggctctcctgtgcagcctctggattcactttcagtagttatgccatgtcttgggttcgccaggctccagggaaggggctggagtgggtcgcttccattagtagtggtaatatcatctactatccagacaatgtgaagggccgattcaccatctctagagataattccaagaacaccctgtacctgcaaatgaacagtctgagggctgaggacacggccgtgtattattgtactagaggccgcagtacctacgggggatttgaccactggggccaaggcaccacagtcaccgtctcctcaggtggtggtggttctggcggcggcggctccggtggtggtggttctgagatcgtgttgacacagtctccagccaccctgtctgtgtctccaggggaaagagccaccctctcctgcagggccagtcagagtgttagcagcaacttagcctggtaccagcagaaacctggccaggctcccaggctcctcatctatgatgcatccaacagggccactggcatcccagccaggttcagtggcagtgggtctgggacagacttcactctcaccatcagcagcctagagcctgaagattttgcagtttattactgtcagcagttcggtgatacactgtggacgttcggccaagggaccaaggtggagatcaaatccggaggtggtggatccgaggtgcagctggtcgagtctggaggaggattggtgcagcctggagggtcattgaaactctcatgtgcagcctctggattcaccttcaataagtacgccatgaactgggtccgccaggctccaggaaagggtttggaatgggttgctcgcataagaagtaaatataataattatgcaacatattatgccgattcagtgaaagacaggttcaccatctccagagatgattcaaaaaacactgcctatctacaaatgaacaacttgaaaactgaggacactgccgtgtactactgtgtgagacatgggaacttcggtaatagctacatatcctactgggcttactggggccaagggactctggtcaccgtctcctcaggtggtggtggttctggcggcggcggctccggtggtggtggttctcagactgttgtgactcaggaaccttcactcaccgtatcacctggtggaacagtcacactcacttgtggctcctcgactggggctgttacatctggcaactacccaaactgggtccaacaaaaaccaggtcaggcaccccgtggtctaataggtgggactaagttcctcgcccccggtactcctgccagattctcaggctccctgcttggaggcaaggctgccctcaccctctcaggggtacagccagaggatgaggcagaatattactgtgttctatggtacagcaaccgctgggtgttcggtggaggaaccaaactgactgtccta

SEQ ID NO: 1524 - protein, 494 aa, Artificial
  unknown organism
EIVLTQSPATLSVSPGERATLSCRASQSVSSNLAWYQQKPGQAPRLLIYDASNRATGIPARFSGSGSGTDFTLTISSLEPEDFAVYYCQQFGDTLWTFGQGTKVEIKGGGGSGGGGSGGGGSEVQLVESGGGLVQPGGSLRLSCAASGFTFSSYAMSWVRQAPGKGLEWVASISSGNIIYYPDNVKGRFTISRDNSKNTLYLQMNSLRAEDTAVYYCTRGRSTYGGFDHWGQGTTVTVSSGGGGSEVQLVESGGGLVQPGGSLKLSCAASGFTFNKYAMNWVRQAPGKGLEWVARIRSKYNNYATYYADSVKDRFTISRDDSKNTAYLQMNNLKTEDTAVYYCVRHGNFGNSYISYWAYWGQGTLVTVSSGGGGSGGGGSGGGGSQTVVTQEPSLTVSPGGTVTLTCGSSTGAVTSGYYPNWVQQKPGQAPRGLIGGTKFLAPGTPARFSGSLLGGKAALTLSGVQPEDEAEYYCALWYSNRWVFGGGTKLTVL

SEQ ID NO: 1525 - DNA, 1482 bp, Artificial
  unknown organism
gagatcgtgttgacacagtctccagccaccctgtctgtgtctccaggggaaagagccaccctctcctgcagggccagtcagagtgttagcagcaacttagcctggtaccagcagaaacctggccaggctcccaggctcctcatctatgatgcatccaacagggccactggcatcccagccaggttcagtggcagtgggtctgggacagacttcactctcaccatcagcagcctagagcctgaagattttgcagtttattactgtcagcagttcggtgatacactgtggacgttcggccaagggaccaaggtggagatcaaaggtggtggtggttctggcggcggcggctccggtggtggtggttctgaggtgcagctggtcgaatctgggggaggccttgtgcagcctggagggtctctgaggctctcctgtgcagcctctggattcactttcagtagttatgccatgtcttgggttcgccaggctccagggaaggggctggagtgggtcgcttccattagtagtggtaatatcatctactatccagacaatgtgaagggccgattcaccatctctagagataattccaagaacaccctgtacctgcaaatgaacagtctgagggctgaggacacggccgtgtattattgtactagaggccgcagtacctacgggggatttgaccactggggccaaggcaccacagtcaccgtctcctccggaggtggtggatccgaggtgcagctggtcgagtctggaggaggattggtgcagcctggagggtcattgaaactctcatgtgcagcctctggattcaccttcaataagtacgccatgaactgggtccgccaggctccaggaaagggtttggaatgggttgctcgcataagaagtaaatataataattatgcaacatattatgccgattcagtgaaagacaggttcaccatctccagagatgattcaaaaaacactgcctatctacaaatgaacaacttgaaaactgaggacactgccgtgtactactgtgtgagacatgggaacttcggtaatagctacatatcctactgggcttactggggccaagggactctggtcaccgtctcctcaggtggtggtggttctggcggcggcggctccggtggtggtggttctcagactgttgtgactcaggaaccttcactcaccgtatcacctggtggaacagtcacactcacttgtggctcctcgactggggctgttacatctggctactacccaaactgggtccaacaaaaaccaggtcaggcaccccgtggtctaataggtgggactaagttcctcgcccccggtactcctgccagattctcaggctccctgcttggaggcaaggctgccctcaccctctcaggggtacagccagaggatgaggcagaatattactgtgctctatggtacagcaaccgctgggtgttcggtggaggaaccaaactgactgtccta

SEQ ID NO: 1526 - protein, 494 aa, Artificial
  unknown organism
EIVLTQSPATLSVSPGERATLSCRASQSVSSNLAWYQQKPGQAPRLLIYDASNRATGIPARFSGSGSGTDFTLTISSLEPEDFAVYYCQQFGDTLWTFGQGTKVEIKGGGGSGGGGSGGGGSEVQLVESGGGLVQPGGSLRLSCAASGFTFSSYAMSWVRQAPGKGLEWVASISSGNIIYYPDNVKGRFTISRDNSKNTLYLQMNSLRAEDTAVYYCTRGRSTYGGFDHWGQGTTVTVSSGGGGSEVQLVESGGGLVQPGGSLKLSCAASGFTFNSYAMNWVRQAPGKGLEWVARIRSKYNNYATYYADSVKGRFTISRDDSKNTAYLQMNNLKTEDTAVYYCVRHGNFGNSYVSWWAYWGQGTLVTVSSGGGGSGGGGSGGGGSQTVVTQEPSLTVSPGGTVTLTCGSSTGAVTSGNYPNWVQQKPGQAPRGLIGGTKFLAPGTPARFSGSLLGGKAALTLSGVQPEDEAEYYCVLWYSNRWVFGGGTKLTVL

SEQ ID NO: 1527 - DNA, 1482 bp, Artificial
  unknown organism
gagatcgtgttgacacagtctccagccaccctgtctgtgtctccaggggaaagagccaccctctcctgcagggccagtcagagtgttagcagcaacttagcctggtaccagcagaaacctggccaggctcccaggctcctcatctatgatgcatccaacagggccactggcatcccagccaggttcagtggcagtgggtctgggacagacttcactctcaccatcagcagcctagagcctgaagattttgcagtttattactgtcagcagttcggtgatacactgtggacgttcggccaagggaccaaggtggagatcaaaggtggtggtggttctggcggcggcggctccggtggtggtggttctgaggtgcagctggtcgaatctgggggaggccttgtgcagcctggagggtctctgaggctctcctgtgcagcctctggattcactttcagtagttatgccatgtcttgggttcgccaggctccagggaaggggctggagtgggtcgcttccattagtagtggtaatatcatctactatccagacaatgtgaagggccgattcaccatctctagagataattccaagaacaccctgtacctgcaaatgaacagtctgagggctgaggacacggccgtgtattattgtactagaggccgcagtacctacgggggatttgaccactggggccaaggcaccacagtcaccgtctcctccggaggtggtggatccgaggtgcagctggtcgagtctggaggaggattggtgcagcctggagggtcattgaaactctcatgtgcagcctctggattcaccttcaatagctacgccatgaactgggtccgccaggctccaggaaagggtttggaatgggttgctcgcataagaagtaaatataataattatgcaacatattatgccgattcagtgaaaggcaggttcaccatctccagagatgattcaaaaaacactgcctatctacaaatgaacaacttgaaaactgaggacactgccgtgtactactgtgtgagacatgggaacttcggtaatagctacgtttcctggtgggcttactggggccaagggactctggtcaccgtctcctcaggtggtggtggttctggcggcggcggctccggtggtggtggttctcagactgttgtgactcaggaaccttcactcaccgtatcacctggtggaacagtcacactcacttgtggctcctcgactggggctgttacatctggcaactacccaaactgggtccaacaaaaaccaggtcaggcaccccgtggtctaataggtgggactaagttcctcgcccccggtactcctgccagattctcaggctccctgcttggaggcaaggctgccctcaccctctcaggggtacagccagaggatgaggcagaatattactgtgttctatggtacagcaaccgctgggtgttcggtggaggaaccaaactgactgtccta

SEQ ID NO: 1528 - protein, 494 aa, Artificial
  unknown organism
EIVLTQSPATLSVSPGERATLSCRASQSVSSNLAWYQQKPGQAPRLLIYDASNRATGIPARFSGSGSGTDFTLTISSLEPEDFAVYYCQQFGDTLWTFGQGTKVEIKGGGGSGGGGSGGGGSEVQLVESGGGLVQPGGSLRLSCAASGFTFSSYAMSWVRQAPGKGLEWVASISSGNIIYYPDNVKGRFTISRDNSKNTLYLQMNSLRAEDTAVYYCTRGRSTYGGFDHWGQGTTVTVSSGGGGSEVQLVESGGGLVQPGGSLKLSCAASGFTFNKYAMNWVRQAPGKGLEWVARIRSKYNNYATYYADSVKDRFTISRDDSKNTAYLQMNNLKTEDTAVYYCVRHGNFGNSYISYWAYWGQGTLVTVSSGGGGSGGGGSGGGGSQTVVTQEPSLTVSPGGTVTLTCGSSTGAVTSGNYPNWVQQKPGQAPRGLIGGTKFLAPGTPARFSGSLLGGKAALTLSGVQPEDEAEYYCVLWYSNRWVFGGGTKLTVL

SEQ ID NO: 1529 - DNA, 1482 bp, Artificial
  unknown organism
gagatcgtgttgacacagtctccagccaccctgtctgtgtctccaggggaaagagccaccctctcctgcagggccagtcagagtgttagcagcaacttagcctggtaccagcagaaacctggccaggctcccaggctcctcatctatgatgcatccaacagggccactggcatcccagccaggttcagtggcagtgggtctgggacagacttcactctcaccatcagcagcctagagcctgaagattttgcagtttattactgtcagcagttcggtgatacactgtggacgttcggccaagggaccaaggtggagatcaaaggtggtggtggttctggcggcggcggctccggtggtggtggttctgaggtgcagctggtcgaatctgggggaggccttgtgcagcctggagggtctctgaggctctcctgtgcagcctctggattcactttcagtagttatgccatgtcttgggttcgccaggctccagggaaggggctggagtgggtcgcttccattagtagtggtaatatcatctactatccagacaatgtgaagggccgattcaccatctctagagataattccaagaacaccctgtacctgcaaatgaacagtctgagggctgaggacacggccgtgtattattgtactagaggccgcagtacctacgggggatttgaccactggggccaaggcaccacagtcaccgtctcctccggaggtggtggatccgaggtgcagctggtcgagtctggaggaggattggtgcagcctggagggtcattgaaactctcatgtgcagcctctggattcaccttcaataagtacgccatgaactgggtccgccaggctccaggaaagggtttggaatgggttgctcgcataagaagtaaatataataattatgcaacatattatgccgattcagtgaaagacaggttcaccatctccagagatgattcaaaaaacactgcctatctacaaatgaacaacttgaaaactgaggacactgccgtgtactactgtgtgagacatgggaacttcggtaatagctacatatcctactgggcttactggggccaagggactctggtcaccgtctcctcaggtggtggtggttctggcggcggcggctccggtggtggtggttctcagactgttgtgactcaggaaccttcactcaccgtatcacctggtggaacagtcacactcacttgtggctcctcgactggggctgttacatctggcaactacccaaactgggtccaacaaaaaccaggtcaggcaccccgtggtctaataggtgggactaagttcctcgcccccggtactcctgccagattctcaggctccctgcttggaggcaaggctgccctcaccctctcaggggtacagccagaggatgaggcagaatattactgtgttctatggtacagcaaccgctgggtgttcggtggaggaaccaaactgactgtccta

SEQ ID NO: 1530 - protein, 118 aa, Artificial; identical to SEQ ID NO: 1504
  unknown organism

SEQ ID NO: 1531 - protein, 5 aa, Artificial
  unknown organism
SYAMS

SEQ ID NO: 1532 - protein, 16 aa, Artificial
  unknown organism
SISSGNIIYYPDNVKG

SEQ ID NO: 1533 - protein, 10 aa, Artificial
  unknown organism
GRSTYGGFDH

SEQ ID NO: 1534 - DNA, 354 bp, Artificial; identical to SEQ ID NO: 1508
  unknown organism

SEQ ID NO: 1535 - protein, 107 aa, Artificial; identical to SEQ ID NO: 281
  unknown organism

SEQ ID NO: 1536 - protein, 11 aa, Artificial
  unknown organism
WASQGVSNNLA

SEQ ID NO: 1537 - protein, 7 aa, Artificial
  unknown organism
DAFNRAT

SEQ ID NO: 1538 - protein, 9 aa, Artificial
  unknown organism
QQFGDSLWT

SEQ ID NO: 1539 - DNA, 321 bp, Artificial; identical to SEQ ID NO: 282
  unknown organism

SEQ ID NO: 1540 - protein, 240 aa, Artificial
  unknown organism
EVQLVESGGGLVQPGGSLRLSCAASGFTFSSYAMSWVRQAPGKGLEWVASISSGNIIYYPDNVKGRFTISRDNSKNTLYLQMNSLRAEDTAVYYCTRGRSTYGGFDHWGQGTTVTVSSGGGGSGGGGSGGGGSEIVMTQSPATLSVSPGERVTLSCWASQGVSNNLAWYQQRPGQAPRLLIYDAFNRATGIPARFSGSGSGTDFTLTISRLEPEDFAVYYCQQFGDSLWTFGQGTKLEIK

SEQ ID NO: 1541 - DNA, 720 bp, Artificial
  unknown organism
gaggtgcagctggtcgaatctgggggaggccttgtgcagcctggagggtctctgaggctctcctgtgcagcctctggattcactttcagtagttatgccatgtcttgggttcgccaggctccagggaaggggctggagtgggtcgcttccattagtagtggtaatatcatctactatccagacaatgtgaagggccgattcaccatctctagagataattccaagaacaccctgtacctgcaaatgaacagtctgagggctgaggacacggccgtgtattattgtactagaggccgcagtacctacgggggatttgaccactggggccaaggcaccacagtcaccgtctcctcaggtggtggtggttctggcggcggcggctccggtggtggtggttctgagatcgtgatgacacagtctccagccaccctgtctgtgtctccaggggaaagagtcaccctctcctgctgggccagtcagggtgtgagcaacaacttagcctggtaccagcagagacctggccaggctcccaggctcctcatctatgatgcattcaacagggccactggcatcccagccaggttcagtggcagtgggtctgggacagacttcactctcaccatcagcagactggagcctgaagattttgcggtgtattactgtcagcagtttggtgattcactttggacgttcggccaggggaccaagctggaaatcaaa

SEQ ID NO: 1542 - protein, 240 aa, Artificial
  unknown organism
EIVMTQSPATLSVSPGERVTLSCWASQGVSNNLAWYQQRPGQAPRLLIYDAFNRATGIPARFSGSGSGTDFTLTISRLEPEDFAVYYCQQFGDSLWTFGQGTKLEIKGGGGSGGGGSGGGGSEVQLVESGGGLVQPGGSLRLSCAASGFTFSSYAMSWVRQAPGKGLEWVASISSGNIIYYPDNVKGRFTISRDNSKNTLYLQMNSLRAEDTAVYYCTRGRSTYGGFDHWGQGTTVTVSS

SEQ ID NO: 1543 - DNA, 720 bp, Artificial
  unknown organism
gagatcgtgatgacacagtctccagccaccctgtctgtgtctccaggggaaagagtcaccctctcctgctgggccagtcagggtgtgagcaacaacttagcctggtaccagcagagacctggccaggctcccaggctcctcatctatgatgcattcaacagggccactggcatcccagccaggttcagtggcagtgggtctgggacagacttcactctcaccatcagcagactggagcctgaagattttgcggtgtattactgtcagcagtttggtgattcactttggacgttcggccaggggaccaagctggaaatcaaaggtggtggtggttctggcggcggcggctccggtggtggtggttctgaggtgcagctggtcgaatctgggggaggccttgtgcagcctggagggtctctgaggctctcctgtgcagcctctggattcactttcagtagttatgccatgtcttgggttcgccaggctccagggaaggggctggagtgggtcgcttccattagtagtggtaatatcatctactatccagacaatgtgaagggccgattcaccatctctagagataattccaagaacaccctgtacctgcaaatgaacagtctgagggctgaggacacggccgtgtattattgtactagaggccgcagtacctacgggggatttgaccactggggccaaggcaccacagtcaccgtctcctcc

SEQ ID NO: 1544 - protein, 495 aa, Artificial
  unknown organism
EVQLVESGGGLVQPGGSLRLSCAASGFTFSSYAMSWVRQAPGKGLEWVASISSGNIIYYPDNVKGRFTISRDNSKNTLYLQMNSLRAEDTAVYYCTRGRSTYGGFDHWGQGTTVTVSSGGGGSGGGGSGGGGSEIVMTQSPATLSVSPGERVTLSCWASQGVSNNLAWYQQRPGQAPRLLIYDAFNRATGIPARFSGSGSGTDFTLTISRLEPEDFAVYYCQQFGDSLWTFGQGTKLEIKSGGGGSEVQLVESGGGLVQPGGSLKLSCAASGFTFNKYAMNWVRQAPGKGLEWVARIRSKYNNYATYYADSVKDRFTISRDDSKNTAYLQMNNLKTEDTAVYYCVRHGNFGNSYISYWAYWGQGTLVTVSSGGGGSGGGGSGGGGSQTVVTQEPSLTVSPGGTVTLTCGSSTGAVTSGYYPNWVQQKPGQAPRGLIGGTKFLAPGTPARFSGSLLGGKAALTLSGVQPEDEAEYYCALWYSNRWVFGGGTKLTVL

SEQ ID NO: 1545 - DNA, 1485 bp, Artificial
  unknown organism
gaggtgcagctggtcgaatctgggggaggccttgtgcagcctggagggtctctgaggctctcctgtgcagcctctggattcactttcagtagttatgccatgtcttgggttcgccaggctccagggaaggggctggagtgggtcgcttccattagtagtggtaatatcatctactatccagacaatgtgaagggccgattcaccatctctagagataattccaagaacaccctgtacctgcaaatgaacagtctgagggctgaggacacggccgtgtattattgtactagaggccgcagtacctacgggggatttgaccactggggccaaggcaccacagtcaccgtctcctcaggtggtggtggttctggcggcggcggctccggtggtggtggttctgagatcgtgatgacacagtctccagccaccctgtctgtgtctccaggggaaagagtcaccctctcctgctgggccagtcagggtgtgagcaacaacttagcctggtaccagcagagacctggccaggctcccaggctcctcatctatgatgcattcaacagggccactggcatcccagccaggttcagtggcagtgggtctgggacagacttcactctcaccatcagcagactggagcctgaagattttgcggtgtattactgtcagcagtttggtgattcactttggacgttcggccaggggaccaagctggaaatcaaatccggaggtggtggatccgaggtgcagctggtcgagtctggaggaggattggtgcagcctggagggtcattgaaactctcatgtgcagcctctggattcaccttcaataagtacgccatgaactgggtccgccaggctccaggaaagggtttggaatgggttgctcgcataagaagtaaatataataattatgcaacatattatgccgattcagtgaaagacaggttcaccatctccagagatgattcaaaaaacactgcctatctacaaatgaacaacttgaaaactgaggacactgccgtgtactactgtgtgagacatgggaacttcggtaatagctacatatcctactgggcttactggggccaagggactctggtcaccgtctcctcaggtggtggtggttctggcggcggcggctccggtggtggtggttctcagactgttgtgactcaggaaccttcactcaccgtatcacctggtggaacagtcacactcacttgtggctcctcgactggggctgttacatctggctactacccaaactgggtccaacaaaaaccaggtcaggcaccccgtggtctaataggtgggactaagttcctcgcccccggtactcctgccagattctcaggctccctgcttggaggcaaggctgccctcaccctctcaggggtacagccagaggatgaggcagaatattactgtgctctatggtacagcaaccgctgggtgttcggtggaggaaccaaactgactgtccta

SEQ ID NO: 1546 - protein, 495 aa, Artificial
  unknown organism
EVQLVESGGGLVQPGGSLRLSCAASGFTFSSYAMSWVRQAPGKGLEWVASISSGNIIYYPDNVKGRFTISRDNSKNTLYLQMNSLRAEDTAVYYCTRGRSTYGGFDHWGQGTTVTVSSGGGGSGGGGSGGGGSEIVMTQSPATLSVSPGERVTLSCWASQGVSNNLAWYQQRPGQAPRLLIYDAFNRATGIPARFSGSGSGTDFTLTISRLEPEDFAVYYCQQFGDSLWTFGQGTKLEIKSGGGGSEVQLVESGGGLVQPGGSLKLSCAASGFTFNSYAMNWVRQAPGKGLEWVARIRSKYNNYATYYADSVKGRFTISRDDSKNTAYLQMNNLKTEDTAVYYCVRHGNFGNSYVSWWAYWGQGTLVTVSSGGGGSGGGGSGGGGSQTVVTQEPSLTVSPGGTVTLTCGSSTGAVTSGNYPNWVQQKPGQAPRGLIGGTKFLAPGTPARFSGSLLGGKAALTLSGVQPEDEAEYYCVLWYSNRWVFGGGTKLTVL

SEQ ID NO: 1547 - DNA, 1485 bp, Artificial
  unknown organism
gaggtgcagctggtcgaatctgggggaggccttgtgcagcctggagggtctctgaggctctcctgtgcagcctctggattcactttcagtagttatgccatgtcttgggttcgccaggctccagggaaggggctggagtgggtcgcttccattagtagtggtaatatcatctactatccagacaatgtgaagggccgattcaccatctctagagataattccaagaacaccctgtacctgcaaatgaacagtctgagggctgaggacacggccgtgtattattgtactagaggccgcagtacctacgggggatttgaccactggggccaaggcaccacagtcaccgtctcctcaggtggtggtggttctggcggcggcggctccggtggtggtggttctgagatcgtgatgacacagtctccagccaccctgtctgtgtctccaggggaaagagtcaccctctcctgctgggccagtcagggtgtgagcaacaacttagcctggtaccagcagagacctggccaggctcccaggctcctcatctatgatgcattcaacagggccactggcatcccagccaggttcagtggcagtgggtctgggacagacttcactctcaccatcagcagactggagcctgaagattttgcggtgtattactgtcagcagtttggtgattcactttggacgttcggccaggggaccaagctggaaatcaaatccggaggtggtggatccgaggtgcagctggtcgagtctggaggaggattggtgcagcctggagggtcattgaaactctcatgtgcagcctctggattcaccttcaatagctacgccatgaactgggtccgccaggctccaggaaagggtttggaatgggttgctcgcataagaagtaaatataataattatgcaacatattatgccgattcagtgaaaggcaggttcaccatctccagagatgattcaaaaaacactgcctatctacaaatgaacaacttgaaaactgaggacactgccgtgtactactgtgtgagacatgggaacttcggtaatagctacgtttcctggtgggcttactggggccaagggactctggtcaccgtctcctcaggtggtggtggttctggcggcggcggctccggtggtggtggttctcagactgttgtgactcaggaaccttcactcaccgtatcacctggtggaacagtcacactcacttgtggctcctcgactggggctgttacatctggcaactacccaaactgggtccaacaaaaaccaggtcaggcaccccgtggtctaataggtgggactaagttcctcgcccccggtactcctgccagattctcaggctccctgcttggaggcaaggctgccctcaccctctcaggggtacagccagaggatgaggcagaatattactgtgttctatggtacagcaaccgctgggtgttcggtggaggaaccaaactgactgtccta

SEQ ID NO: 1548 - protein, 495 aa, Artificial
  unknown organism
EVQLVESGGGLVQPGGSLRLSCAASGFTFSSYAMSWVRQAPGKGLEWVASISSGNIIYYPDNVKGRFTISRDNSKNTLYLQMNSLRAEDTAVYYCTRGRSTYGGFDHWGQGTTVTVSSGGGGSGGGGSGGGGSEIVMTQSPATLSVSPGERVTLSCWASQGVSNNLAWYQQRPGQAPRLLIYDAFNRATGIPARFSGSGSGTDFTLTISRLEPEDFAVYYCQQFGDSLWTFGQGTKLEIKSGGGGSEVQLVESGGGLVQPGGSLKLSCAASGFTFNKYAMNWVRQAPGKGLEWVARIRSKYNNYATYYADSVKDRFTISRDDSKNTAYLQMNNLKTEDTAVYYCVRHGNFGNSYISYWAYWGQGTLVTVSSGGGGSGGGGSGGGGSQTVVTQEPSLTVSPGGTVTLTCGSSTGAVTSGNYPNWVQQKPGQAPRGLIGGTKFLAPGTPARFSGSLLGGKAALTLSGVQPEDEAEYYCVLWYSNRWVFGGGTKLTVL

SEQ ID NO: 1549 - DNA, 1485 bp, Artificial
  unknown organism
gaggtgcagctggtcgaatctgggggaggccttgtgcagcctggagggtctctgaggctctcctgtgcagcctctggattcactttcagtagttatgccatgtcttgggttcgccaggctccagggaaggggctggagtgggtcgcttccattagtagtggtaatatcatctactatccagacaatgtgaagggccgattcaccatctctagagataattccaagaacaccctgtacctgcaaatgaacagtctgagggctgaggacacggccgtgtattattgtactagaggccgcagtacctacgggggatttgaccactggggccaaggcaccacagtcaccgtctcctcaggtggtggtggttctggcggcggcggctccggtggtggtggttctgagatcgtgatgacacagtctccagccaccctgtctgtgtctccaggggaaagagtcaccctctcctgctgggccagtcagggtgtgagcaacaacttagcctggtaccagcagagacctggccaggctcccaggctcctcatctatgatgcattcaacagggccactggcatcccagccaggttcagtggcagtgggtctgggacagacttcactctcaccatcagcagactggagcctgaagattttgcggtgtattactgtcagcagtttggtgattcactttggacgttcggccaggggaccaagctggaaatcaaatccggaggtggtggatccgaggtgcagctggtcgagtctggaggaggattggtgcagcctggagggtcattgaaactctcatgtgcagcctctggattcaccttcaataagtacgccatgaactgggtccgccaggctccaggaaagggtttggaatgggttgctcgcataagaagtaaatataataattatgcaacatattatgccgattcagtgaaagacaggttcaccatctccagagatgattcaaaaaacactgcctatctacaaatgaacaacttgaaaactgaggacactgccgtgtactactgtgtgagacatgggaacttcggtaatagctacatatcctactgggcttactggggccaagggactctggtcaccgtctcctcaggtggtggtggttctggcggcggcggctccggtggtggtggttctcagactgttgtgactcaggaaccttcactcaccgtatcacctggtggaacagtcacactcacttgtggctcctcgactggggctgttacatctggcaactacccaaactgggtccaacaaaaaccaggtcaggcaccccgtggtctaataggtgggactaagttcctcgcccccggtactcctgccagattctcaggctccctgcttggaggcaaggctgccctcaccctctcaggggtacagccagaggatgaggcagaatattactgtgttctatggtacagcaaccgctgggtgttcggtggaggaaccaaactgactgtccta

SEQ ID NO: 1550 - protein, 494 aa, Artificial
  unknown organism
EIVMTQSPATLSVSPGERVTLSCWASQGVSNNLAWYQQRPGQAPRLLIYDAFNRATGIPARFSGSGSGTDFTLTISRLEPEDFAVYYCQQFGDSLWTFGQGTKLEIKGGGGSGGGGSGGGGSEVQLVESGGGLVQPGGSLRLSCAASGFTFSSYAMSWVRQAPGKGLEWVASISSGNIIYYPDNVKGRFTISRDNSKNTLYLQMNSLRAEDTAVYYCTRGRSTYGGFDHWGQGTTVTVSSGGGGSEVQLVESGGGLVQPGGSLKLSCAASGFTFNKYAMNWVRQAPGKGLEWVARIRSKYNNYATYYADSVKDRFTISRDDSKNTAYLQMNNLKTEDTAVYYCVRHGNFGNSYISYWAYWGQGTLVTVSSGGGGSGGGGSGGGGSQTVVTQEPSLTVSPGGTVTLTCGSSTGAVTSGYYPNWVQQKPGQAPRGLIGGTKFLAPGTPARFSGSLLGGKAALTLSGVQPEDEAEYYCALWYSNRWVFGGGTKLTVL

SEQ ID NO: 1551 - DNA, 1482 bp, Artificial
  unknown organism
gagatcgtgatgacacagtctccagccaccctgtctgtgtctccaggggaaagagtcaccctctcctgctgggccagtcagggtgtgagcaacaacttagcctggtaccagcagagacctggccaggctcccaggctcctcatctatgatgcattcaacagggccactggcatcccagccaggttcagtggcagtgggtctgggacagacttcactctcaccatcagcagactggagcctgaagattttgcggtgtattactgtcagcagtttggtgattcactttggacgttcggccaggggaccaagctggaaatcaaaggtggtggtggttctggcggcggcggctccggtggtggtggttctgaggtgcagctggtcgaatctgggggaggccttgtgcagcctggagggtctctgaggctctcctgtgcagcctctggattcactttcagtagttatgccatgtcttgggttcgccaggctccagggaaggggctggagtgggtcgcttccattagtagtggtaatatcatctactatccagacaatgtgaagggccgattcaccatctctagagataattccaagaacaccctgtacctgcaaatgaacagtctgagggctgaggacacggccgtgtattattgtactagaggccgcagtacctacgggggatttgaccactggggccaaggcaccacagtcaccgtctcctccggaggtggtggatccgaggtgcagctggtcgagtctggaggaggattggtgcagcctggagggtcattgaaactctcatgtgcagcctctggattcaccttcaataagtacgccatgaactgggtccgccaggctccaggaaagggtttggaatgggttgctcgcataagaagtaaatataataattatgcaacatattatgccgattcagtgaaagacaggttcaccatctccagagatgattcaaaaaacactgcctatctacaaatgaacaacttgaaaactgaggacactgccgtgtactactgtgtgagacatgggaacttcggtaatagctacatatcctactgggcttactggggccaagggactctggtcaccgtctcctcaggtggtggtggttctggcggcggcggctccggtggtggtggttctcagactgttgtgactcaggaaccttcactcaccgtatcacctggtggaacagtcacactcacttgtggctcctcgactggggctgttacatctggctactacccaaactgggtccaacaaaaaccaggtcaggcaccccgtggtctaataggtgggactaagttcctcgcccccggtactcctgccagattctcaggctccctgcttggaggcaaggctgccctcaccctctcaggggtacagccagaggatgaggcagaatattactgtgctctatggtacagcaaccgctgggtgttcggtggaggaaccaaactgactgtccta

SEQ ID NO: 1552 - protein, 494 aa, Artificial
  unknown organism
EIVMTQSPATLSVSPGERVTLSCWASQGVSNNLAWYQQRPGQAPRLLIYDAFNRATGIPARFSGSGSGTDFTLTISRLEPEDFAVYYCQQFGDSLWTFGQGTKLEIKGGGGSGGGGSGGGGSEVQLVESGGGLVQPGGSLRLSCAASGFTFSSYAMSWVRQAPGKGLEWVASISSGNIIYYPDNVKGRFTISRDNSKNTLYLQMNSLRAEDTAVYYCTRGRSTYGGFDHWGQGTTVTVSSGGGGSEVQLVESGGGLVQPGGSLKLSCAASGFTFNSYAMNWVRQAPGKGLEWVARIRSKYNNYATYYADSVKGRFTISRDDSKNTAYLQMNNLKTEDTAVYYCVRHGNFGNSYVSWWAYWGQGTLVTVSSGGGGSGGGGSGGGGSQTVVTQEPSLTVSPGGTVTLTCGSSTGAVTSGNYPNWVQQKPGQAPRGLIGGTKFLAPGTPARFSGSLLGGKAALTLSGVQPEDEAEYYCVLWYSNRWVFGGGTKLTVL

SEQ ID NO: 1553 - DNA, 1482 bp, Artificial
  unknown organism
gagatcgtgatgacacagtctccagccaccctgtctgtgtctccaggggaaagagtcaccctctcctgctgggccagtcagggtgtgagcaacaacttagcctggtaccagcagagacctggccaggctcccaggctcctcatctatgatgcattcaacagggccactggcatcccagccaggttcagtggcagtgggtctgggacagacttcactctcaccatcagcagactggagcctgaagattttgcggtgtattactgtcagcagtttggtgattcactttggacgttcggccaggggaccaagctggaaatcaaaggtggtggtggttctggcggcggcggctccggtggtggtggttctgaggtgcagctggtcgaatctgggggaggccttgtgcagcctggagggtctctgaggctctcctgtgcagcctctggattcactttcagtagttatgccatgtcttgggttcgccaggctccagggaaggggctggagtgggtcgcttccattagtagtggtaatatcatctactatccagacaatgtgaagggccgattcaccatctctagagataattccaagaacaccctgtacctgcaaatgaacagtctgagggctgaggacacggccgtgtattattgtactagaggccgcagtacctacgggggatttgaccactggggccaaggcaccacagtcaccgtctcctccggaggtggtggatccgaggtgcagctggtcgagtctggaggaggattggtgcagcctggagggtcattgaaactctcatgtgcagcctctggattcaccttcaatagctacgccatgaactgggtccgccaggctccaggaaagggtttggaatgggttgctcgcataagaagtaaatataataattatgcaacatattatgccgattcagtgaaaggcaggttcaccatctccagagatgattcaaaaaacactgcctatctacaaatgaacaacttgaaaactgaggacactgccgtgtactactgtgtgagacatgggaacttcggtaatagctacgtttcctggtgggcttactggggccaagggactctggtcaccgtctcctcaggtggtggtggttctggcggcggcggctccggtggtggtggttctcagactgttgtgactcaggaaccttcactcaccgtatcacctggtggaacagtcacactcacttgtggctcctcgactggggctgttacatctggcaactacccaaactgggtccaacaaaaaccaggtcaggcaccccgtggtctaataggtgggactaagttcctcgcccccggtactcctgccagattctcaggctccctgcttggaggcaaggctgccctcaccctctcaggggtacagccagaggatgaggcagaatattactgtgttctatggtacagcaaccgctgggtgttcggtggaggaaccaaactgactgtccta

SEQ ID NO: 1554 - protein, 494 aa, Artificial
  unknown organism
EIVMTQSPATLSVSPGERVTLSCWASQGVSNNLAWYQQRPGQAPRLLIYDAFNRATGIPARFSGSGSGTDFTLTISRLEPEDFAVYYCQQFGDSLWTFGQGTKLEIKGGGGSGGGGSGGGGSEVQLVESGGGLVQPGGSLRLSCAASGFTFSSYAMSWVRQAPGKGLEWVASISSGNIIYYPDNVKGRFTISRDNSKNTLYLQMNSLRAEDTAVYYCTRGRSTYGGFDHWGQGTTVTVSSGGGGSEVQLVESGGGLVQPGGSLKLSCAASGFTFNKYAMNWVRQAPGKGLEWVARIRSKYNNYATYYADSVKDRFTISRDDSKNTAYLQMNNLKTEDTAVYYCVRHGNFGNSYISYWAYWGQGTLVTVSSGGGGSGGGGSGGGGSQTVVTQEPSLTVSPGGTVTLTCGSSTGAVTSGNYPNWVQQKPGQAPRGLIGGTKFLAPGTPARFSGSLLGGKAALTLSGVQPEDEAEYYCVLWYSNRWVFGGGTKLTVL

SEQ ID NO: 1555 - DNA, 1482 bp, Artificial
  unknown organism
gagatcgtgatgacacagtctccagccaccctgtctgtgtctccaggggaaagagtcaccctctcctgctgggccagtcagggtgtgagcaacaacttagcctggtaccagcagagacctggccaggctcccaggctcctcatctatgatgcattcaacagggccactggcatcccagccaggttcagtggcagtgggtctgggacagacttcactctcaccatcagcagactggagcctgaagattttgcggtgtattactgtcagcagtttggtgattcactttggacgttcggccaggggaccaagctggaaatcaaaggtggtggtggttctggcggcggcggctccggtggtggtggttctgaggtgcagctggtcgaatctgggggaggccttgtgcagcctggagggtctctgaggctctcctgtgcagcctctggattcactttcagtagttatgccatgtcttgggttcgccaggctccagggaaggggctggagtgggtcgcttccattagtagtggtaatatcatctactatccagacaatgtgaagggccgattcaccatctctagagataattccaagaacaccctgtacctgcaaatgaacagtctgagggctgaggacacggccgtgtattattgtactagaggccgcagtacctacgggggatttgaccactggggccaaggcaccacagtcaccgtctcctccggaggtggtggatccgaggtgcagctggtcgagtctggaggaggattggtgcagcctggagggtcattgaaactctcatgtgcagcctctggattcaccttcaataagtacgccatgaactgggtccgccaggctccaggaaagggtttggaatgggttgctcgcataagaagtaaatataataattatgcaacatattatgccgattcagtgaaagacaggttcaccatctccagagatgattcaaaaaacactgcctatctacaaatgaacaacttgaaaactgaggacactgccgtgtactactgtgtgagacatgggaacttcggtaatagctacatatcctactgggcttactggggccaagggactctggtcaccgtctcctcaggtggtggtggttctggcggcggcggctccggtggtggtggttctcagactgttgtgactcaggaaccttcactcaccgtatcacctggtggaacagtcacactcacttgtggctcctcgactggggctgttacatctggcaactacccaaactgggtccaacaaaaaccaggtcaggcaccccgtggtctaataggtgggactaagttcctcgcccccggtactcctgccagattctcaggctccctgcttggaggcaaggctgccctcaccctctcaggggtacagccagaggatgaggcagaatattactgtgttctatggtacagcaaccgctgggtgttcggtggaggaaccaaactgactgtccta

SEQ ID NO: 1556 - protein, 495 aa, Artificial
  unknown organism
EVQLVESGGGLVQPGGSLKLSCAASGFTFNKYAMNWVRQAPGKGLEWVARIRSKYNNYATYYADSVKDRFTISRDDSKNTAYLQMNNLKTEDTAVYYCVRHGNFGNSYISYWAYWGQGTLVTVSSGGGGSGGGGSGGGGSQTVVTQEPSLTVSPGGTVTLTCGSSTGAVTSGYYPNWVQQKPGQAPRGLIGGTKFLAPGTPARFSGSLLGGKAALTLSGVQPEDEAEYYCALWYSNRWVFGGGTKLTVLSGGGGSEVQLVESGGGLVQPGGSLRLSCAASGFTFSSYAMSWVRQAPGKGLEWVASISSGNIIYYPDNVKGRFTISRDNSKNTLYLQMNSLRAEDTAVYYCTRGRSTYGGFDHWGQGTTVTVSSGGGGSGGGGSGGGGSEIVMTQSPATLSVSPGERVTLSCWASQGVSNNLAWYQQRPGQAPRLLIYDAFNRATGIPARFSGSGSGTDFTLTISRLEPEDFAVYYCQQFGDSLWTFGQGTKLEIK

SEQ ID NO: 1557 - DNA, 1485 bp, Artificial
  unknown organism
gaggtgcagctggtcgagtctggaggaggattggtgcagcctggagggtcattgaaactctcatgtgcagcctctggattcaccttcaataagtacgccatgaactgggtccgccaggctccaggaaagggtttggaatgggttgctcgcataagaagtaaatataataattatgcaacatattatgccgattcagtgaaagacaggttcaccatctccagagatgattcaaaaaacactgcctatctacaaatgaacaacttgaaaactgaggacactgccgtgtactactgtgtgagacatgggaacttcggtaatagctacatatcctactgggcttactggggccaagggactctggtcaccgtctcctcaggtggtggtggttctggcggcggcggctccggtggtggtggttctcagactgttgtgactcaggaaccttcactcaccgtatcacctggtggaacagtcacactcacttgtggctcctcgactggggctgttacatctggctactacccaaactgggtccaacaaaaaccaggtcaggcaccccgtggtctaataggtgggactaagttcctcgcccccggtactcctgccagattctcaggctccctgcttggaggcaaggctgccctcaccctctcaggggtacagccagaggatgaggcagaatattactgtgctctatggtacagcaaccgctgggtgttcggtggaggaaccaaactgactgtcctatccggaggtggtggatccgaggtgcagctggtcgaatctgggggaggccttgtgcagcctggagggtctctgaggctctcctgtgcagcctctggattcactttcagtagttatgccatgtcttgggttcgccaggctccagggaaggggctggagtgggtcgcttccattagtagtggtaatatcatctactatccagacaatgtgaagggccgattcaccatctctagagataattccaagaacaccctgtacctgcaaatgaacagtctgagggctgaggacacggccgtgtattattgtactagaggccgcagtacctacgggggatttgaccactggggccaaggcaccacagtcaccgtctcctcaggtggtggtggttctggcggcggcggctccggtggtggtggttctgagatcgtgatgacacagtctccagccaccctgtctgtgtctccaggggaaagagtcaccctctcctgctgggccagtcagggtgtgagcaacaacttagcctggtaccagcagagacctggccaggctcccaggctcctcatctatgatgcattcaacagggccactggcatcccagccaggttcagtggcagtgggtctgggacagacttcactctcaccatcagcagactggagcctgaagattttgcggtgtattactgtcagcagtttggtgattcactttggacgttcggccaggggaccaagctggaaatcaaa

SEQ ID NO: 1558 - protein, 495 aa, Artificial
  unknown organism
EVQLVESGGGLVQPGGSLKLSCAASGFTFNSYAMNWVRQAPGKGLEWVARIRSKYNNYATYYADSVKGRFTISRDDSKNTAYLQMNNLKTEDTAVYYCVRHGNFGNSYVSWWAYWGQGTLVTVSSGGGGSGGGGSGGGGSQTVVTQEPSLTVSPGGTVTLTCGSSTGAVTSGNYPNWVQQKPGQAPRGLIGGTKFLAPGTPARFSGSLLGGKAALTLSGVQPEDEAEYYCVLWYSNRWVFGGGTKLTVLSGGGGSEVQLVESGGGLVQPGGSLRLSCAASGFTFSSYAMSWVRQAPGKGLEWVASISSGNIIYYPDNVKGRFTISRDNSKNTLYLQMNSLRAEDTAVYYCTRGRSTYGGFDHWGQGTTVTVSSGGGGSGGGGSGGGGSEIVMTQSPATLSVSPGERVTLSCWASQGVSNNLAWYQQRPGQAPRLLIYDAFNRATGIPARFSGSGSGTDFTLTISRLEPEDFAVYYCQQFGDSLWTFGQGTKLEIK

SEQ ID NO: 1559 - DNA, 1485 bp, Artificial
  unknown organism
gaggtgcagctggtcgagtctggaggaggattggtgcagcctggagggtcattgaaactctcatgtgcagcctctggattcaccttcaatagctacgccatgaactgggtccgccaggctccaggaaagggtttggaatgggttgctcgcataagaagtaaatataataattatgcaacatattatgccgattcagtgaaaggcaggttcaccatctccagagatgattcaaaaaacactgcctatctacaaatgaacaacttgaaaactgaggacactgccgtgtactactgtgtgagacatgggaacttcggtaatagctacgtttcctggtgggcttactggggccaagggactctggtcaccgtctcctcaggtggtggtggttctggcggcggcggctccggtggtggtggttctcagactgttgtgactcaggaaccttcactcaccgtatcacctggtggaacagtcacactcacttgtggctcctcgactggggctgttacatctggcaactacccaaactgggtccaacaaaaaccaggtcaggcaccccgtggtctaataggtgggactaagttcctcgcccccggtactcctgccagattctcaggctccctgcttggaggcaaggctgccctcaccctctcaggggtacagccagaggatgaggcagaatattactgtgttctatggtacagcaaccgctgggtgttcggtggaggaaccaaactgactgtcctatccggaggtggtggatccgaggtgcagctggtcgaatctgggggaggccttgtgcagcctggagggtctctgaggctctcctgtgcagcctctggattcactttcagtagttatgccatgtcttgggttcgccaggctccagggaaggggctggagtgggtcgcttccattagtagtggtaatatcatctactatccagacaatgtgaagggccgattcaccatctctagagataattccaagaacaccctgtacctgcaaatgaacagtctgagggctgaggacacggccgtgtattattgtactagaggccgcagtacctacgggggatttgaccactggggccaaggcaccacagtcaccgtctcctcaggtggtggtggttctggcggcggcggctccggtggtggtggttctgagatcgtgatgacacagtctccagccaccctgtctgtgtctccaggggaaagagtcaccctctcctgctgggccagtcagggtgtgagcaacaacttagcctggtaccagcagagacctggccaggctcccaggctcctcatctatgatgcattcaacagggccactggcatcccagccaggttcagtggcagtgggtctgggacagacttcactctcaccatcagcagactggagcctgaagattttgcggtgtattactgtcagcagtttggtgattcactttggacgttcggccaggggaccaagctggaaatcaaa

SEQ ID NO: 1560 - protein, 495 aa, Artificial
  unknown organism
EVQLVESGGGLVQPGGSLKLSCAASGFTFNKYAMNWVRQAPGKGLEWVARIRSKYNNYATYYADSVKDRFTISRDDSKNTAYLQMNNLKTEDTAVYYCVRHGNFGNSYISYWAYWGQGTLVTVSSGGGGSGGGGSGGGGSQTVVTQEPSLTVSPGGTVTLTCGSSTGAVTSGNYPNWVQQKPGQAPRGLIGGTKFLAPGTPARFSGSLLGGKAALTLSGVQPEDEAEYYCVLWYSNRWVFGGGTKLTVLSGGGGSEVQLVESGGGLVQPGGSLRLSCAASGFTFSSYAMSWVRQAPGKGLEWVASISSGNIIYYPDNVKGRFTISRDNSKNTLYLQMNSLRAEDTAVYYCTRGRSTYGGFDHWGQGTTVTVSSGGGGSGGGGSGGGGSEIVMTQSPATLSVSPGERVTLSCWASQGVSNNLAWYQQRPGQAPRLLIYDAFNRATGIPARFSGSGSGTDFTLTISRLEPEDFAVYYCQQFGDSLWTFGQGTKLEIK

SEQ ID NO: 1561 - DNA, 1485 bp, Artificial
  unknown organism
gaggtgcagctggtcgagtctggaggaggattggtgcagcctggagggtcattgaaactctcatgtgcagcctctggattcaccttcaataagtacgccatgaactgggtccgccaggctccaggaaagggtttggaatgggttgctcgcataagaagtaaatataataattatgcaacatattatgccgattcagtgaaagacaggttcaccatctccagagatgattcaaaaaacactgcctatctacaaatgaacaacttgaaaactgaggacactgccgtgtactactgtgtgagacatgggaacttcggtaatagctacatatcctactgggcttactggggccaagggactctggtcaccgtctcctcaggtggtggtggttctggcggcggcggctccggtggtggtggttctcagactgttgtgactcaggaaccttcactcaccgtatcacctggtggaacagtcacactcacttgtggctcctcgactggggctgttacatctggcaactacccaaactgggtccaacaaaaaccaggtcaggcaccccgtggtctaataggtgggactaagttcctcgcccccggtactcctgccagattctcaggctccctgcttggaggcaaggctgccctcaccctctcaggggtacagccagaggatgaggcagaatattactgtgttctatggtacagcaaccgctgggtgttcggtggaggaaccaaactgactgtcctatccggaggtggtggatccgaggtgcagctggtcgaatctgggggaggccttgtgcagcctggagggtctctgaggctctcctgtgcagcctctggattcactttcagtagttatgccatgtcttgggttcgccaggctccagggaaggggctggagtgggtcgcttccattagtagtggtaatatcatctactatccagacaatgtgaagggccgattcaccatctctagagataattccaagaacaccctgtacctgcaaatgaacagtctgagggctgaggacacggccgtgtattattgtactagaggccgcagtacctacgggggatttgaccactggggccaaggcaccacagtcaccgtctcctcaggtggtggtggttctggcggcggcggctccggtggtggtggttctgagatcgtgatgacacagtctccagccaccctgtctgtgtctccaggggaaagagtcaccctctcctgctgggccagtcagggtgtgagcaacaacttagcctggtaccagcagagacctggccaggctcccaggctcctcatctatgatgcattcaacagggccactggcatcccagccaggttcagtggcagtgggtctgggacagacttcactctcaccatcagcagactggagcctgaagattttgcggtgtattactgtcagcagtttggtgattcactttggacgttcggccaggggaccaagctggaaatcaaa

SEQ ID NO: 1562 - protein, 495 aa, Artificial
  unknown organism
EVQLVESGGGLVQPGGSLKLSCAASGFTFNKYAMNWVRQAPGKGLEWVARIRSKYNNYATYYADSVKDRFTISRDDSKNTAYLQMNNLKTEDTAVYYCVRHGNFGNSYISYWAYWGQGTLVTVSSGGGGSGGGGSGGGGSQTVVTQEPSLTVSPGGTVTLTCGSSTGAVTSGNYPNWVQQKPGQAPRGLIGGTKFLAPGTPARFSGSLLGGKAALTLSGVQPEDEAEYYCVLWYSNRWVFGGGTKLTVLSGGGGSEIVMTQSPATLSVSPGERVTLSCWASQGVSNNLAWYQQRPGQAPRLLIYDAFNRATGIPARFSGSGSGTDFTLTISRLEPEDFAVYYCQQFGDSLWTFGQGTKLEIKGGGGSGGGGSGGGGSEVQLVESGGGLVQPGGSLRLSCAASGFTFSSYAMSWVRQAPGKGLEWVASISSGNIIYYPDNVKGRFTISRDNSKNTLYLQMNSLRAEDTAVYYCTRGRSTYGGFDHWGQGTTVTVSS

SEQ ID NO: 1563 - DNA, 1485 bp, Artificial
  unknown organism
gaggtgcagctggtcgagtctggaggaggattggtgcagcctggagggtcattgaaactctcatgtgcagcctctggattcaccttcaataagtacgccatgaactgggtccgccaggctccaggaaagggtttggaatgggttgctcgcataagaagtaaatataataattatgcaacatattatgccgattcagtgaaagacaggttcaccatctccagagatgattcaaaaaacactgcctatctacaaatgaacaacttgaaaactgaggacactgccgtgtactactgtgtgagacatgggaacttcggtaatagctacatatcctactgggcttactggggccaagggactctggtcaccgtctcctcaggtggtggtggttctggcggcggcggctccggtggtggtggttctcagactgttgtgactcaggaaccttcactcaccgtatcacctggtggaacagtcacactcacttgtggctcctcgactggggctgttacatctggcaactacccaaactgggtccaacaaaaaccaggtcaggcaccccgtggtctaataggtgggactaagttcctcgcccccggtactcctgccagattctcaggctccctgcttggaggcaaggctgccctcaccctctcaggggtacagccagaggatgaggcagaatattactgtgttctatggtacagcaaccgctgggtgttcggtggaggaaccaaactgactgtcctatccggaggtggtggatccgagatcgtgatgacacagtctccagccaccctgtctgtgtctccaggggaaagagtcaccctctcctgctgggccagtcagggtgtgagcaacaacttagcctggtaccagcagagacctggccaggctcccaggctcctcatctatgatgcattcaacagggccactggcatcccagccaggttcagtggcagtgggtctgggacagacttcactctcaccatcagcagactggagcctgaagattttgcggtgtattactgtcagcagtttggtgattcactttggacgttcggccaggggaccaagctggaaatcaaaggtggtggtggttctggcggcggcggctccggtggtggtggttctgaggtgcagctggtcgaatctgggggaggccttgtgcagcctggagggtctctgaggctctcctgtgcagcctctggattcactttcagtagttatgccatgtcttgggttcgccaggctccagggaaggggctggagtgggtcgcttccattagtagtggtaatatcatctactatccagacaatgtgaagggccgattcaccatctctagagataattccaagaacaccctgtacctgcaaatgaacagtctgagggctgaggacacggccgtgtattattgtactagaggccgcagtacctacgggggatttgaccactggggccaaggcaccacagtcaccgtctcctca

SEQ ID NO: 1564 - protein, 494 aa, Artificial
  unknown organism
QTVVTQEPSLTVSPGGTVTLTCGSSTGAVTSGNYPNWVQQKPGQAPRGLIGGTKFLAPGTPARFSGSLLGGKAALTLSGVQPEDEAEYYCVLWYSNRWVFGGGTKLTVLGGGGSGGGGSGGGGSEVQLVESGGGLVQPGGSLKLSCAASGFTFNKYAMNWVRQAPGKGLEWVARIRSKYNNYATYYADSVKDRFTISRDDSKNTAYLQMNNLKTEDTAVYYCVRHGNFGNSYISYWAYWGQGTLVTVSSGGGGSEIVMTQSPATLSVSPGERVTLSCWASQGVSNNLAWYQQRPGQAPRLLIYDAFNRATGIPARFSGSGSGTDFTLTISRLEPEDFAVYYCQQFGDSLWTFGQGTKLEIKGGGGSGGGGSGGGGSEVQLVESGGGLVQPGGSLRLSCAASGFTFSSYAMSWVRQAPGKGLEWVASISSGNIIYYPDNVKGRFTISRDNSKNTLYLQMNSLRAEDTAVYYCTRGRSTYGGFDHWGQGTTVTVSS

SEQ ID NO: 1565 - DNA, 1482 bp, Artificial
  unknown organism
cagactgttgtgactcaggaaccttcactcaccgtatcacctggtggaacagtcacactcacttgtggctcctcgactggggctgttacatctggcaactacccaaactgggtccaacaaaaaccaggtcaggcaccccgtggtctaataggtgggactaagttcctcgcccccggtactcctgccagattctcaggctccctgcttggaggcaaggctgccctcaccctctcaggggtacagccagaggatgaggcagaatattactgtgttctatggtacagcaaccgctgggtgttcggtggaggaaccaaactgactgtcctaggtggtggtggttctggcggcggcggctccggtggtggtggttctgaggtgcagctggtcgagtctggaggaggattggtgcagcctggagggtcattgaaactctcatgtgcagcctctggattcaccttcaataagtacgccatgaactgggtccgccaggctccaggaaagggtttggaatgggttgctcgcataagaagtaaatataataattatgcaacatattatgccgattcagtgaaagacaggttcaccatctccagagatgattcaaaaaacactgcctatctacaaatgaacaacttgaaaactgaggacactgccgtgtactactgtgtgagacatgggaacttcggtaatagctacatatcctactgggcttactggggccaagggactctggtcaccgtctcctcaggaggtggtggatccgagatcgtgatgacacagtctccagccaccctgtctgtgtctccaggggaaagagtcaccctctcctgctgggccagtcagggtgtgagcaacaacttagcctggtaccagcagagacctggccaggctcccaggctcctcatctatgatgcattcaacagggccactggcatcccagccaggttcagtggcagtgggtctgggacagacttcactctcaccatcagcagactggagcctgaagattttgcggtgtattactgtcagcagtttggtgattcactttggacgttcggccaggggaccaagctggaaatcaaaggtggtggtggttctggcggcggcggctccggtggtggtggttctgaggtgcagctggtcgaatctgggggaggccttgtgcagcctggagggtctctgaggctctcctgtgcagcctctggattcactttcagtagttatgccatgtcttgggttcgccaggctccagggaaggggctggagtgggtcgcttccattagtagtggtaatatcatctactatccagacaatgtgaagggccgattcaccatctctagagataattccaagaacaccctgtacctgcaaatgaacagtctgagggctgaggacacggccgtgtattattgtactagaggccgcagtacctacgggggatttgaccactggggccaaggcaccacagtcaccgtctcctca

SEQ ID NO: 1566 - protein, 494 aa, Artificial
  unknown organism
EIVMTQSPATLSVSPGERVTLSCWASQGVSNNLAWYQQRPGQAPRLLIYDAFNRATGIPARFSGSGSGTDFTLTISRLEPEDFAVYYCQQFGDSLWTFGQGTKLEIKGGGGSGGGGSGGGGSEVQLVESGGGLVQPGGSLRLSCAASGFTFSSYAMSWVRQAPGKGLEWVASISSGNIIYYPDNVKGRFTISRDNSKNTLYLQMNSLRAEDTAVYYCTRGRSTYGGFDHWGQGTTVTVSSGGGGSQTVVTQEPSLTVSPGGTVTLTCGSSTGAVTSGNYPNWVQQKPGQAPRGLIGGTKFLAPGTPARFSGSLLGGKAALTLSGVQPEDEAEYYCVLWYSNRWVFGGGTKLTVLGGGGSGGGGSGGGGSEVQLVESGGGLVQPGGSLKLSCAASGFTFNKYAMNWVRQAPGKGLEWVARIRSKYNNYATYYADSVKDRFTISRDDSKNTAYLQMNNLKTEDTAVYYCVRHGNFGNSYISYWAYWGQGTLVTVSS

SEQ ID NO: 1567 - DNA, 1482 bp, Artificial
  unknown organism
gagatcgtgatgacacagtctccagccaccctgtctgtgtctccaggggaaagagtcaccctctcctgctgggccagtcagggtgtgagcaacaacttagcctggtaccagcagagacctggccaggctcccaggctcctcatctatgatgcattcaacagggccactggcatcccagccaggttcagtggcagtgggtctgggacagacttcactctcaccatcagcagactggagcctgaagattttgcggtgtattactgtcagcagtttggtgattcactttggacgttcggccaggggaccaagctggaaatcaaaggtggtggtggttctggcggcggcggctccggtggtggtggttctgaggtgcagctggtcgaatctgggggaggccttgtgcagcctggagggtctctgaggctctcctgtgcagcctctggattcactttcagtagttatgccatgtcttgggttcgccaggctccagggaaggggctggagtgggtcgcttccattagtagtggtaatatcatctactatccagacaatgtgaagggccgattcaccatctctagagataattccaagaacaccctgtacctgcaaatgaacagtctgagggctgaggacacggccgtgtattattgtactagaggccgcagtacctacgggggatttgaccactggggccaaggcaccacagtcaccgtctcctcaggaggtggtggatcccagactgttgtgactcaggaaccttcactcaccgtatcacctggtggaacagtcacactcacttgtggctcctcgactggggctgttacatctggcaactacccaaactgggtccaacaaaaaccaggtcaggcaccccgtggtctaataggtgggactaagttcctcgcccccggtactcctgccagattctcaggctccctgcttggaggcaaggctgccctcaccctctcaggggtacagccagaggatgaggcagaatattactgtgttctatggtacagcaaccgctgggtgttcggtggaggaaccaaactgactgtcctaggtggtggtggttctggcggcggcggctccggtggtggtggttctgaggtgcagctggtcgagtctggaggaggattggtgcagcctggagggtcattgaaactctcatgtgcagcctctggattcaccttcaataagtacgccatgaactgggtccgccaggctccaggaaagggtttggaatgggttgctcgcataagaagtaaatataataattatgcaacatattatgccgattcagtgaaagacaggttcaccatctccagagatgattcaaaaaacactgcctatctacaaatgaacaacttgaaaactgaggacactgccgtgtactactgtgtgagacatgggaacttcggtaatagctacatatcctactgggcttactggggccaagggactctggtcaccgtctcctca

SEQ ID NO: 1568 - protein, 11 aa, Artificial
  unknown organism
RASQSVSRGLA

SEQ ID NO: 1569 - protein, 7 aa, Artificial
  unknown organism
SASTRAT

SEQ ID NO: 1570 - protein, 9 aa, Artificial
  unknown organism
QQYNKWPLT

SEQ ID NO: 1571 - protein, 9 aa, Artificial
  unknown organism
MQHTFWPWT

SEQ ID NO: 1572 - protein, 114 aa, Artificial
  unknown organism
EVQLVESGGGLVKPGGSLRLSCAASGFTFSSYDMSWVRQAPGKGLEWVSTISSGGSYTYYLDSIKGRFTISRDNAKNSLYLQMNSLRAEDTAVYYCARQGLDYWGRGTLVTVSS

SEQ ID NO: 1573 - protein, 5 aa, Artificial
  unknown organism
SYDMS

SEQ ID NO: 1574 - protein, 17 aa, Artificial
  unknown organism
TISSGGSYTYYLDSIKG

SEQ ID NO: 1575 - protein, 5 aa, Artificial
  unknown organism
QGLDY

SEQ ID NO: 1576 - DNA, 342 bp, Artificial
  unknown organism
gaagtgcagctggtggagtctgggggaggcttagtgaagcctggagggtccctaagactctcctgtgcagcctctggattcactttcagtagctatgacatgtcttgggttcgccaggctccggggaaggggctggagtgggtctcaaccattagtagtggtggtagttacacctactatctagacagtataaagggccgattcaccatctccagagacaatgccaagaactccctgtacctgcaaatgaacagtctgagggctgaggacacggccgtgtattactgtgcaagacaggggttggactactggggtcgaggaaccttagtcaccgtctcctca

SEQ ID NO: 1577 - protein, 106 aa, Artificial
  unknown organism
EIVLTQSPATLSLSPGERATLSCSASSSINYIYWLQQKPGQAPRILIYLTSNLASGVPARFSGSGSGTDFTLTISSLEPEDFAVYYCLQWSSNPLTFGGGTKVEIK

SEQ ID NO: 1578 - protein, 10 aa, Artificial
  unknown organism
SASSSINYIY

SEQ ID NO: 1579 - protein, 7 aa, Artificial
  unknown organism
LTSNLAS

SEQ ID NO: 1580 - protein, 9 aa, Artificial
  unknown organism
LQWSSNPLT

SEQ ID NO: 1581 - DNA, 318 bp, Artificial
  unknown organism
gaaattgttctcacccagtctccagcaaccctgtctctgtctccaggggagagggccaccctgtcctgcagtgccagctcaagtataaattacatatactggctccagcagaagccaggacaggctcctagaatcttgatttatctcacatccaacctggcttctggagtccctgcgcgcttcagtggcagtgggtctggaaccgacttcactctcacaatcagcagcctggagcctgaagattttgccgtttattactgcctgcagtggagtagtaacccgctcacattcggtggtgggaccaaggtggagattaaa

SEQ ID NO: 1582 - protein, 235 aa, Artificial
  unknown organism
EVQLVESGGGLVKPGGSLRLSCAASGFTFSSYDMSWVRQAPGKGLEWVSTISSGGSYTYYLDSIKGRFTISRDNAKNSLYLQMNSLRAEDTAVYYCARQGLDYWGRGTLVTVSSGGGGSGGGGSGGGGSEIVLTQSPATLSLSPGERATLSCSASSSINYIYWLQQKPGQAPRILIYLTSNLASGVPARFSGSGSGTDFTLTISSLEPEDFAVYYCLQWSSNPLTFGGGTKVEIK

SEQ ID NO: 1583 - DNA, 705 bp, Artificial
  unknown organism
gaagtgcagctggtggagtctgggggaggcttagtgaagcctggagggtccctaagactctcctgtgcagcctctggattcactttcagtagctatgacatgtcttgggttcgccaggctccggggaaggggctggagtgggtctcaaccattagtagtggtggtagttacacctactatctagacagtataaagggccgattcaccatctccagagacaatgccaagaactccctgtacctgcaaatgaacagtctgagggctgaggacacggccgtgtattactgtgcaagacaggggttggactactggggtcgaggaaccttagtcaccgtctcctcaggtggtggtggttctggcggcggcggctccggtggtggtggttctgaaattgttctcacccagtctccagcaaccctgtctctgtctccaggggagagggccaccctgtcctgcagtgccagctcaagtataaattacatatactggctccagcagaagccaggacaggctcctagaatcttgatttatctcacatccaacctggcttctggagtccctgcgcgcttcagtggcagtgggtctggaaccgacttcactctcacaatcagcagcctggagcctgaagattttgccgtttattactgcctgcagtggagtagtaacccgctcacattcggtggtgggaccaaggtggagattaaa

SEQ ID NO: 1584 - protein, 235 aa, Artificial
  unknown organism
EIVLTQSPATLSLSPGERATLSCSASSSINYIYWLQQKPGQAPRILIYLTSNLASGVPARFSGSGSGTDFTLTISSLEPEDFAVYYCLQWSSNPLTFGGGTKVEIKGGGGSGGGGSGGGGSEVQLVESGGGLVKPGGSLRLSCAASGFTFSSYDMSWVRQAPGKGLEWVSTISSGGSYTYYLDSIKGRFTISRDNAKNSLYLQMNSLRAEDTAVYYCARQGLDYWGRGTLVTVSS

SEQ ID NO: 1585 - DNA, 705 bp, Artificial
  unknown organism
gaaattgttctcacccagtctccagcaaccctgtctctgtctccaggggagagggccaccctgtcctgcagtgccagctcaagtataaattacatatactggctccagcagaagccaggacaggctcctagaatcttgatttatctcacatccaacctggcttctggagtccctgcgcgcttcagtggcagtgggtctggaaccgacttcactctcacaatcagcagcctggagcctgaagattttgccgtttattactgcctgcagtggagtagtaacccgctcacattcggtggtgggaccaaggtggagattaaaggtggtggtggttctggcggcggcggctccggtggtggtggttctgaagtgcagctggtggagtctgggggaggcttagtgaagcctggagggtccctaagactctcctgtgcagcctctggattcactttcagtagctatgacatgtcttgggttcgccaggctccggggaaggggctggagtgggtctcaaccattagtagtggtggtagttacacctactatctagacagtataaagggccgattcaccatctccagagacaatgccaagaactccctgtacctgcaaatgaacagtctgagggctgaggacacggccgtgtattactgtgcaagacaggggttggactactggggtcgaggaaccttagtcaccgtctcctca

SEQ ID NO: 1586 - protein, 490 aa, Artificial
  unknown organism
EVQLVESGGGLVKPGGSLRLSCAASGFTFSSYDMSWVRQAPGKGLEWVSTISSGGSYTYYLDSIKGRFTISRDNAKNSLYLQMNSLRAEDTAVYYCARQGLDYWGRGTLVTVSSGGGGSGGGGSGGGGSEIVLTQSPATLSLSPGERATLSCSASSSINYIYWLQQKPGQAPRILIYLTSNLASGVPARFSGSGSGTDFTLTISSLEPEDFAVYYCLQWSSNPLTFGGGTKVEIKSGGGGSEVQLVESGGGLVQPGGSLKLSCAASGFTFNKYAMNWVRQAPGKGLEWVARIRSKYNNYATYYADSVKDRFTISRDDSKNTAYLQMNNLKTEDTAVYYCVRHGNFGNSYISYWAYWGQGTLVTVSSGGGGSGGGGSGGGGSQTVVTQEPSLTVSPGGTVTLTCGSSTGAVTSGNYPNWVQQKPGQAPRGLIGGTKFLAPGTPARFSGSLLGGKAALTLSGVQPEDEAEYYCVLWYSNRWVFGGGTKLTVL

SEQ ID NO: 1587 - DNA, 1470 bp, Artificial
  unknown organism
gaagtgcagctggtggagtctgggggaggcttagtgaagcctggagggtccctaagactctcctgtgcagcctctggattcactttcagtagctatgacatgtcttgggttcgccaggctccggggaaggggctggagtgggtctcaaccattagtagtggtggtagttacacctactatctagacagtataaagggccgattcaccatctccagagacaatgccaagaactccctgtacctgcaaatgaacagtctgagggctgaggacacggccgtgtattactgtgcaagacaggggttggactactggggtcgaggaaccttagtcaccgtctcctcaggtggtggtggttctggcggcggcggctccggtggtggtggttctgaaattgttctcacccagtctccagcaaccctgtctctgtctccaggggagagggccaccctgtcctgcagtgccagctcaagtataaattacatatactggctccagcagaagccaggacaggctcctagaatcttgatttatctcacatccaacctggcttctggagtccctgcgcgcttcagtggcagtgggtctggaaccgacttcactctcacaatcagcagcctggagcctgaagattttgccgtttattactgcctgcagtggagtagtaacccgctcacattcggtggtgggaccaaggtggagattaaatccggaggtggtggatccgaggtgcagctggtcgagtctggaggaggattggtgcagcctggagggtcattgaaactctcatgtgcagcctctggattcaccttcaataagtacgccatgaactgggtccgccaggctccaggaaagggtttggaatgggttgctcgcataagaagtaaatataataattatgcaacatattatgccgattcagtgaaagacaggttcaccatctccagagatgattcaaaaaacactgcctatctacaaatgaacaacttgaaaactgaggacactgccgtgtactactgtgtgagacatgggaacttcggtaatagctacatatcctactgggcttactggggccaagggactctggtcaccgtctcctcaggtggtggtggttctggcggcggcggctccggtggtggtggttctcagactgttgtgactcaggaaccttcactcaccgtatcacctggtggaacagtcacactcacttgtggctcctcgactggggctgttacatctggcaactacccaaactgggtccaacaaaaaccaggtcaggcaccccgtggtctaataggtgggactaagttcctcgcccccggtactcctgccagattctcaggctccctgcttggaggcaaggctgccctcaccctctcaggggtacagccagaggatgaggcagaatattactgtgttctatggtacagcaaccgctgggtgttcggtggaggaaccaaactgactgtccta

SEQ ID NO: 1588 - protein, 489 aa, Artificial
  unknown organism
EIVLTQSPATLSLSPGERATLSCSASSSINYIYWLQQKPGQAPRILIYLTSNLASGVPARFSGSGSGTDFTLTISSLEPEDFAVYYCLQWSSNPLTFGGGTKVEIKGGGGSGGGGSGGGGSEVQLVESGGGLVKPGGSLRLSCAASGFTFSSYDMSWVRQAPGKGLEWVSTISSGGSYTYYLDSIKGRFTISRDNAKNSLYLQMNSLRAEDTAVYYCARQGLDYWGRGTLVTVSSGGGGSEVQLVESGGGLVQPGGSLKLSCAASGFTFNKYAMNWVRQAPGKGLEWVARIRSKYNNYATYYADSVKDRFTISRDDSKNTAYLQMNNLKTEDTAVYYCVRHGNFGNSYISYWAYWGQGTLVTVSSGGGGSGGGGSGGGGSQTVVTQEPSLTVSPGGTVTLTCGSSTGAVTSGNYPNWVQQKPGQAPRGLIGGTKFLAPGTPARFSGSLLGGKAALTLSGVQPEDEAEYYCVLWYSNRWVFGGGTKLTVL

SEQ ID NO: 1589 - DNA, 1467 bp, Artificial
  unknown organism
gaaattgttctcacccagtctccagcaaccctgtctctgtctccaggggagagggccaccctgtcctgcagtgccagctcaagtataaattacatatactggctccagcagaagccaggacaggctcctagaatcttgatttatctcacatccaacctggcttctggagtccctgcgcgcttcagtggcagtgggtctggaaccgacttcactctcacaatcagcagcctggagcctgaagattttgccgtttattactgcctgcagtggagtagtaacccgctcacattcggtggtgggaccaaggtggagattaaaggtggtggtggttctggcggcggcggctccggtggtggtggttctgaagtgcagctggtggagtctgggggaggcttagtgaagcctggagggtccctaagactctcctgtgcagcctctggattcactttcagtagctatgacatgtcttgggttcgccaggctccggggaaggggctggagtgggtctcaaccattagtagtggtggtagttacacctactatctagacagtataaagggccgattcaccatctccagagacaatgccaagaactccctgtacctgcaaatgaacagtctgagggctgaggacacggccgtgtattactgtgcaagacaggggttggactactggggtcgaggaaccttagtcaccgtctcctccggaggtggtggatccgaggtgcagctggtcgagtctggaggaggattggtgcagcctggagggtcattgaaactctcatgtgcagcctctggattcaccttcaataagtacgccatgaactgggtccgccaggctccaggaaagggtttggaatgggttgctcgcataagaagtaaatataataattatgcaacatattatgccgattcagtgaaagacaggttcaccatctccagagatgattcaaaaaacactgcctatctacaaatgaacaacttgaaaactgaggacactgccgtgtactactgtgtgagacatgggaacttcggtaatagctacatatcctactgggcttactggggccaagggactctggtcaccgtctcctcaggtggtggtggttctggcggcggcggctccggtggtggtggttctcagactgttgtgactcaggaaccttcactcaccgtatcacctggtggaacagtcacactcacttgtggctcctcgactggggctgttacatctggcaactacccaaactgggtccaacaaaaaccaggtcaggcaccccgtggtctaataggtgggactaagttcctcgcccccggtactcctgccagattctcaggctccctgcttggaggcaaggctgccctcaccctctcaggggtacagccagaggatgaggcagaatattactgtgttctatggtacagcaaccgctgggtgttcggtggaggaaccaaactgactgtccta

SEQ ID NO: 1590 - protein, 114 aa, Artificial
  unknown organism
EVQLVQSGGGLVHPGESLRLSCAASGFTFSDYDMSWVRQAPGKGLEWVSAISGSGGSTYYADSVKGRFTISRDNSKNTLYLQMNSLRAEDTAVYYCARQGLDYWGRGTLVTVSS

SEQ ID NO: 1591 - protein, 5 aa, Artificial
  unknown organism
DYDMS

SEQ ID NO: 1592 - protein, 17 aa, Artificial
  unknown organism
AISGSGGSTYYADSVKG

SEQ ID NO: 1593 - protein, 5 aa, Artificial
  unknown organism
QGLDY

SEQ ID NO: 1594 - DNA, 342 bp, Artificial
  unknown organism
gaggtgcagctggtccagtctgggggaggcttggtacaccctggggagtctctgagactctcctgtgcagcctctggattcacctttagcgactatgacatgagctgggtccgccaggctccagggaaggggctggagtgggtctcagctattagtggtagtggtggtagcacatactacgcagactccgtgaagggccggttcaccatctccagagacaattccaagaacacgctgtatctgcaaatgaacagcctgagagccgaggacacggccgtgtattactgtgcaagacaggggcttgactactggggtcgaggaaccttggtcaccgtctcctca

SEQ ID NO: 1595 - protein, 106 aa, Artificial
  unknown organism
DIQMTQSPSSLSASVGERVTMTCSASSSINYIYWLQQKPGQAPRILIYLTSNLATGVPSRFSGSGSGTDFTLTISSLEPEDFATYYCLQWSSNPLTFGQGTRLEIK

SEQ ID NO: 1596 - protein, 10 aa, Artificial
  unknown organism
SASSSINYIY

SEQ ID NO: 1597 - protein, 7 aa, Artificial
  unknown organism
LTSNLAT

SEQ ID NO: 1598 - protein, 9 aa, Artificial
  unknown organism
LQWSSNPLT

SEQ ID NO: 1599 - DNA, 318 bp, Artificial
  unknown organism
gacatccaaatgacccagtctccatcatccctgtctgcgtctgtaggggagagggtcaccatgacctgcagtgccagctcaagtataaattacatatactggctccagcagaagccaggacaggctcctagaatcttgatttatctcacatccaacctggctactggagtcccttcgcgcttcagtggcagtgggtctggaaccgacttcactctcacaatcagcagcctggagcctgaagattttgccacttattactgcctgcagtggagtagtaacccgctcaccttcggccaagggacacgactggagattaaa

SEQ ID NO: 1600 - protein, 235 aa, Artificial
  unknown organism
EVQLVQSGGGLVHPGESLRLSCAASGFTFSDYDMSWVRQAPGKGLEWVSAISGSGGSTYYADSVKGRFTISRDNSKNTLYLQMNSLRAEDTAVYYCARQGLDYWGRGTLVTVSSGGGGSGGGGSGGGGSDIQMTQSPSSLSASVGERVTMTCSASSSINYIYWLQQKPGQAPRILIYLTSNLATGVPSRFSGSGSGTDFTLTISSLEPEDFATYYCLQWSSNPLTFGQGTRLEIK

SEQ ID NO: 1601 - DNA, 705 bp, Artificial
  unknown organism
gaggtgcagctggtccagtctgggggaggcttggtacaccctggggagtctctgagactctcctgtgcagcctctggattcacctttagcgactatgacatgagctgggtccgccaggctccagggaaggggctggagtgggtctcagctattagtggtagtggtggtagcacatactacgcagactccgtgaagggccggttcaccatctccagagacaattccaagaacacgctgtatctgcaaatgaacagcctgagagccgaggacacggccgtgtattactgtgcaagacaggggcttgactactggggtcgaggaaccttggtcaccgtctcctcaggtggtggtggttctggcggcggcggctccggtggtggtggttctgacatccaaatgacccagtctccatcatccctgtctgcgtctgtaggggagagggtcaccatgacctgcagtgccagctcaagtataaattacatatactggctccagcagaagccaggacaggctcctagaatcttgatttatctcacatccaacctggctactggagtcccttcgcgcttcagtggcagtgggtctggaaccgacttcactctcacaatcagcagcctggagcctgaagattttgccacttattactgcctgcagtggagtagtaacccgctcaccttcggccaagggacacgactggagattaaa

SEQ ID NO: 1602 - protein, 490 aa, Artificial
  unknown organism
EVQLVQSGGGLVHPGESLRLSCAASGFTFSDYDMSWVRQAPGKGLEWVSAISGSGGSTYYADSVKGRFTISRDNSKNTLYLQMNSLRAEDTAVYYCARQGLDYWGRGTLVTVSSGGGGSGGGGSGGGGSDIQMTQSPSSLSASVGERVTMTCSASSSINYIYWLQQKPGQAPRILIYLTSNLATGVPSRFSGSGSGTDFTLTISSLEPEDFATYYCLQWSSNPLTFGQGTRLEIKSGGGGSEVQLVESGGGLVQPGGSLKLSCAASGFTFNKYAMNWVRQAPGKGLEWVARIRSKYNNYATYYADSVKDRFTISRDDSKNTAYLQMNNLKTEDTAVYYCVRHGNFGNSYISYWAYWGQGTLVTVSSGGGGSGGGGSGGGGSQTVVTQEPSLTVSPGGTVTLTCGSSTGAVTSGNYPNWVQQKPGQAPRGLIGGTKFLAPGTPARFSGSLLGGKAALTLSGVQPEDEAEYYCVLWYSNRWVFGGGTKLTVL

SEQ ID NO: 1603 - DNA, 1470 bp, Artificial
  unknown organism
gaggtgcagctggtccagtctgggggaggcttggtacaccctggggagtctctgagactctcctgtgcagcctctggattcacctttagcgactatgacatgagctgggtccgccaggctccagggaaggggctggagtgggtctcagctattagtggtagtggtggtagcacatactacgcagactccgtgaagggccggttcaccatctccagagacaattccaagaacacgctgtatctgcaaatgaacagcctgagagccgaggacacggccgtgtattactgtgcaagacaggggcttgactactggggtcgaggaaccttggtcaccgtctcctcaggtggtggtggttctggcggcggcggctccggtggtggtggttctgacatccaaatgacccagtctccatcatccctgtctgcgtctgtaggggagagggtcaccatgacctgcagtgccagctcaagtataaattacatatactggctccagcagaagccaggacaggctcctagaatcttgatttatctcacatccaacctggctactggagtcccttcgcgcttcagtggcagtgggtctggaaccgacttcactctcacaatcagcagcctggagcctgaagattttgccacttattactgcctgcagtggagtagtaacccgctcaccttcggccaagggacacgactggagattaaatccggaggtggtggatccgaggtgcagctggtcgagtctggaggaggattggtgcagcctggagggtcattgaaactctcatgtgcagcctctggattcaccttcaataagtacgccatgaactgggtccgccaggctccaggaaagggtttggaatgggttgctcgcataagaagtaaatataataattatgcaacatattatgccgattcagtgaaagacaggttcaccatctccagagatgattcaaaaaacactgcctatctacaaatgaacaacttgaaaactgaggacactgccgtgtactactgtgtgagacatgggaacttcggtaatagctacatatcctactgggcttactggggccaagggactctggtcaccgtctcctcaggtggtggtggttctggcggcggcggctccggtggtggtggttctcagactgttgtgactcaggaaccttcactcaccgtatcacctggtggaacagtcacactcacttgtggctcctcgactggggctgttacatctggcaactacccaaactgggtccaacaaaaaccaggtcaggcaccccgtggtctaataggtgggactaagttcctcgcccccggtactcctgccagattctcaggctccctgcttggaggcaaggctgccctcaccctctcaggggtacagccagaggatgaggcagaatattactgtgttctatggtacagcaaccgctgggtgttcggtggaggaaccaaactgactgtccta

SEQ ID NO: 1604 - protein, 114 aa, Artificial
  unknown organism
EVQLVQSGGGLVHPGESLRLSCAASGFTFSDYDMSWVRQAPGKGLEWVSAISGSGGSTYYADSVKGRFTISRDNSKNMLYLQMNSLRAEDTAVYYCARQGLDYWGRGTLVTVSS

SEQ ID NO: 1605 - protein, 5 aa, Artificial
  unknown organism
DYDMS

SEQ ID NO: 1606 - protein, 17 aa, Artificial
  unknown organism
AISGSGGSTYYADSVKG

SEQ ID NO: 1607 - protein, 5 aa, Artificial
  unknown organism
QGLDY

SEQ ID NO: 1608 - DNA, 342 bp, Artificial
  unknown organism
gaggtgcagctggtccagtctgggggaggcttggtacaccctggggagtctctgagactctcctgtgcagcctctggattcacctttagcgactatgacatgagctgggtccgccaggctccagggaaggggctggagtgggtctcagctattagtggtagtggtggtagcacatactacgcagactccgtgaagggccggttcaccatctccagagacaattccaagaacatgctgtatctgcaaatgaacagcctgagagccgaggacacggccgtgtattactgtgcaagacaggggctagactactggggtcgaggaaccttggtcaccgtctcctca

SEQ ID NO: 1609 - protein, 106 aa, Artificial
  unknown organism
DIQMTQSPATLSASVGERVTMSCSASSSINYIYWLQQKPGKAPKILIYLTSNLATGVPARFSGSGSGTDFTLTISSLQPEDFATYYCLQWSSNPLTFGQGTRLEIK

SEQ ID NO: 1610 - protein, 10 aa, Artificial
  unknown organism
SASSSINYIY

SEQ ID NO: 1611 - protein, 7 aa, Artificial
  unknown organism
LTSNLAT

SEQ ID NO: 1612 - protein, 9 aa, Artificial
  unknown organism
LQWSSNPLT

SEQ ID NO: 1613 - DNA, 318 bp, Artificial
  unknown organism
gacatccaaatgacccagtctccagcaaccctgtctgcgtctgtaggggagagggtcaccatgtcctgcagtgccagctcaagtataaattacatatactggctccagcagaagccaggaaaggctcctaaaatcttgatttatctcacatccaacctggctactggagtccctgcgcgcttcagtggcagtgggtctggaaccgacttcactctcacaatcagcagcctgcagcctgaagattttgccacttattactgcctgcagtggagtagtaacccgctcaccttcggccaagggacacgactggagattaaa

SEQ ID NO: 1614 - protein, 235 aa, Artificial
  unknown organism
EVQLVQSGGGLVHPGESLRLSCAASGFTFSDYDMSWVRQAPGKGLEWVSAISGSGGSTYYADSVKGRFTISRDNSKNMLYLQMNSLRAEDTAVYYCARQGLDYWGRGTLVTVSSGGGGSGGGGSGGGGSDIQMTQSPATLSASVGERVTMSCSASSSINYIYWLQQKPGKAPKILIYLTSNLATGVPARFSGSGSGTDFTLTISSLQPEDFATYYCLQWSSNPLTFGQGTRLEIK

SEQ ID NO: 1615 - DNA, 705 bp, Artificial
  unknown organism
gaggtgcagctggtccagtctgggggaggcttggtacaccctggggagtctctgagactctcctgtgcagcctctggattcacctttagcgactatgacatgagctgggtccgccaggctccagggaaggggctggagtgggtctcagctattagtggtagtggtggtagcacatactacgcagactccgtgaagggccggttcaccatctccagagacaattccaagaacatgctgtatctgcaaatgaacagcctgagagccgaggacacggccgtgtattactgtgcaagacaggggctagactactggggtcgaggaaccttggtcaccgtctcctcaggtggtggtggttctggcggcggcggctccggtggtggtggttctgacatccaaatgacccagtctccagcaaccctgtctgcgtctgtaggggagagggtcaccatgtcctgcagtgccagctcaagtataaattacatatactggctccagcagaagccaggaaaggctcctaaaatcttgatttatctcacatccaacctggctactggagtccctgcgcgcttcagtggcagtgggtctggaaccgacttcactctcacaatcagcagcctgcagcctgaagattttgccacttattactgcctgcagtggagtagtaacccgctcaccttcggccaagggacacgactggagattaaa

SEQ ID NO: 1616 - protein, 490 aa, Artificial
  unknown organism
EVQLVQSGGGLVHPGESLRLSCAASGFTFSDYDMSWVRQAPGKGLEWVSAISGSGGSTYYADSVKGRFTISRDNSKNMLYLQMNSLRAEDTAVYYCARQGLDYWGRGTLVTVSSGGGGSGGGGSGGGGSDIQMTQSPATLSASVGERVTMSCSASSSINYIYWLQQKPGKAPKILIYLTSNLATGVPARFSGSGSGTDFTLTISSLQPEDFATYYCLQWSSNPLTFGQGTRLEIKSGGGGSEVQLVESGGGLVQPGGSLKLSCAASGFTFNKYAMNWVRQAPGKGLEWVARIRSKYNNYATYYADSVKDRFTISRDDSKNTAYLQMNNLKTEDTAVYYCVRHGNFGNSYISYWAYWGQGTLVTVSSGGGGSGGGGSGGGGSQTVVTQEPSLTVSPGGTVTLTCGSSTGAVTSGNYPNWVQQKPGQAPRGLIGGTKFLAPGTPARFSGSLLGGKAALTLSGVQPEDEAEYYCVLWYSNRWVFGGGTKLTVL

SEQ ID NO: 1617 - DNA, 1470 bp, Artificial
  unknown organism
gaggtgcagctggtccagtctgggggaggcttggtacaccctggggagtctctgagactctcctgtgcagcctctggattcacctttagcgactatgacatgagctgggtccgccaggctccagggaaggggctggagtgggtctcagctattagtggtagtggtggtagcacatactacgcagactccgtgaagggccggttcaccatctccagagacaattccaagaacatgctgtatctgcaaatgaacagcctgagagccgaggacacggccgtgtattactgtgcaagacaggggctagactactggggtcgaggaaccttggtcaccgtctcctcaggtggtggtggttctggcggcggcggctccggtggtggtggttctgacatccaaatgacccagtctccagcaaccctgtctgcgtctgtaggggagagggtcaccatgtcctgcagtgccagctcaagtataaattacatatactggctccagcagaagccaggaaaggctcctaaaatcttgatttatctcacatccaacctggctactggagtccctgcgcgcttcagtggcagtgggtctggaaccgacttcactctcacaatcagcagcctgcagcctgaagattttgccacttattactgcctgcagtggagtagtaacccgctcaccttcggccaagggacacgactggagattaaatccggaggtggtggatccgaggtgcagctggtcgagtctggaggaggattggtgcagcctggagggtcattgaaactctcatgtgcagcctctggattcaccttcaataagtacgccatgaactgggtccgccaggctccaggaaagggtttggaatgggttgctcgcataagaagtaaatataataattatgcaacatattatgccgattcagtgaaagacaggttcaccatctccagagatgattcaaaaaacactgcctatctacaaatgaacaacttgaaaactgaggacactgccgtgtactactgtgtgagacatgggaacttcggtaatagctacatatcctactgggcttactggggccaagggactctggtcaccgtctcctcaggtggtggtggttctggcggcggcggctccggtggtggtggttctcagactgttgtgactcaggaaccttcactcaccgtatcacctggtggaacagtcacactcacttgtggctcctcgactggggctgttacatctggcaactacccaaactgggtccaacaaaaaccaggtcaggcaccccgtggtctaataggtgggactaagttcctcgcccccggtactcctgccagattctcaggctccctgcttggaggcaaggctgccctcaccctctcaggggtacagccagaggatgaggcagaatattactgtgttctatggtacagcaaccgctgggtgttcggtggaggaaccaaactgactgtccta

SEQ ID NO: 1618 - protein, 114 aa, Artificial
  unknown organism
EVQLVQSGGGLVHPGESLRLSCAASGFTFSDYDMSWVRQAPGKGLEWVSAISGSGGSTYYADSVKGRFTISRDNSKNTLYLQMNSLRAEDTAVYYCARQGLDYWGQGTLVTVSS

SEQ ID NO: 1619 - protein, 5 aa, Artificial
  unknown organism
DYDMS

SEQ ID NO: 1620 - protein, 17 aa, Artificial
  unknown organism
AISGSGGSTYYADSVKG

SEQ ID NO: 1621 - protein, 5 aa, Artificial
  unknown organism
QGLDY

SEQ ID NO: 1622 - DNA, 342 bp, Artificial
  unknown organism
gaggtgcagctggtccagtctgggggaggcttggtacaccctggggagtctctgagactctcctgtgcagcctctggattcacctttagcgactatgacatgagctgggtccgccaggctccagggaaggggctggagtgggtctcagctattagtggtagtggtggtagcacatactacgcagactccgtgaagggccggttcaccatctccagagacaattccaagaacacgctgtatctgcaaatgaacagcctgagagccgaggacacggccgtgtattactgtgcaagacaggggctggactactggggtcaaggaaccttggtcaccgtctcctca

SEQ ID NO: 1623 - protein, 106 aa, Artificial
  unknown organism
DIQMTQSPATLSASLGDRVTISCSASSSINYIYWLQQKPGQAPRILIYLTSNLATGVPSRFSGSGSGTDFTLTISSLEPEDFATYYCLQWSSNPLTFGQGTRLEIK

SEQ ID NO: 1624 - protein, 10 aa, Artificial
  unknown organism
SASSSINYIY

SEQ ID NO: 1625 - protein, 7 aa, Artificial
  unknown organism
LTSNLAT

SEQ ID NO: 1626 - protein, 9 aa, Artificial
  unknown organism
LQWSSNPLT

SEQ ID NO: 1627 - DNA, 318 bp, Artificial
  unknown organism
gacatccaaatgacccagtctccagcaaccctgtctgcgtctctaggggacagggtcaccatttcctgcagtgccagctcaagtataaattacatatactggctccagcagaagccaggacaggctcctagaatcttgatttatctcacatccaacctggctactggagtcccttcgcgcttcagtggcagtgggtctggaaccgacttcactctcacaatcagcagcctggagcctgaagattttgccacttattactgcctgcagtggagtagtaacccgctcaccttcggccaagggacacgactggagattaaa

SEQ ID NO: 1628 - protein, 235 aa, Artificial
  unknown organism
EVQLVQSGGGLVHPGESLRLSCAASGFTFSDYDMSWVRQAPGKGLEWVSAISGSGGSTYYADSVKGRFTISRDNSKNTLYLQMNSLRAEDTAVYYCARQGLDYWGQGTLVTVSSGGGGSGGGGSGGGGSDIQMTQSPATLSASLGDRVTISCSASSSINYIYWLQQKPGQAPRILIYLTSNLATGVPSRFSGSGSGTDFTLTISSLEPEDFATYYCLQWSSNPLTFGQGTRLEIK

SEQ ID NO: 1629 - DNA, 705 bp, Artificial
  unknown organism
gaggtgcagctggtccagtctgggggaggcttggtacaccctggggagtctctgagactctcctgtgcagcctctggattcacctttagcgactatgacatgagctgggtccgccaggctccagggaaggggctggagtgggtctcagctattagtggtagtggtggtagcacatactacgcagactccgtgaagggccggttcaccatctccagagacaattccaagaacacgctgtatctgcaaatgaacagcctgagagccgaggacacggccgtgtattactgtgcaagacaggggctggactactggggtcaaggaaccttggtcaccgtctcctcaggtggtggtggttctggcggcggcggctccggtggtggtggttctgacatccaaatgacccagtctccagcaaccctgtctgcgtctctaggggacagggtcaccatttcctgcagtgccagctcaagtataaattacatatactggctccagcagaagccaggacaggctcctagaatcttgatttatctcacatccaacctggctactggagtcccttcgcgcttcagtggcagtgggtctggaaccgacttcactctcacaatcagcagcctggagcctgaagattttgccacttattactgcctgcagtggagtagtaacccgctcaccttcggccaagggacacgactggagattaaa

SEQ ID NO: 1630 - protein, 490 aa, Artificial
  unknown organism
EVQLVQSGGGLVHPGESLRLSCAASGFTFSDYDMSWVRQAPGKGLEWVSAISGSGGSTYYADSVKGRFTISRDNSKNTLYLQMNSLRAEDTAVYYCARQGLDYWGQGTLVTVSSGGGGSGGGGSGGGGSDIQMTQSPATLSASLGDRVTISCSASSSINYIYWLQQKPGQAPRILIYLTSNLATGVPSRFSGSGSGTDFTLTISSLEPEDFATYYCLQWSSNPLTFGQGTRLEIKSGGGGSEVQLVESGGGLVQPGGSLKLSCAASGFTFNKYAMNWVRQAPGKGLEWVARIRSKYNNYATYYADSVKDRFTISRDDSKNTAYLQMNNLKTEDTAVYYCVRHGNFGNSYISYWAYWGQGTLVTVSSGGGGSGGGGSGGGGSQTVVTQEPSLTVSPGGTVTLTCGSSTGAVTSGNYPNWVQQKPGQAPRGLIGGTKFLAPGTPARFSGSLLGGKAALTLSGVQPEDEAEYYCVLWYSNRWVFGGGTKLTVL

SEQ ID NO: 1631 - DNA, 1470 bp, Artificial
  unknown organism
gaggtgcagctggtccagtctgggggaggcttggtacaccctggggagtctctgagactctcctgtgcagcctctggattcacctttagcgactatgacatgagctgggtccgccaggctccagggaaggggctggagtgggtctcagctattagtggtagtggtggtagcacatactacgcagactccgtgaagggccggttcaccatctccagagacaattccaagaacacgctgtatctgcaaatgaacagcctgagagccgaggacacggccgtgtattactgtgcaagacaggggctggactactggggtcaaggaaccttggtcaccgtctcctcaggtggtggtggttctggcggcggcggctccggtggtggtggttctgacatccaaatgacccagtctccagcaaccctgtctgcgtctctaggggacagggtcaccatttcctgcagtgccagctcaagtataaattacatatactggctccagcagaagccaggacaggctcctagaatcttgatttatctcacatccaacctggctactggagtcccttcgcgcttcagtggcagtgggtctggaaccgacttcactctcacaatcagcagcctggagcctgaagattttgccacttattactgcctgcagtggagtagtaacccgctcaccttcggccaagggacacgactggagattaaatccggaggtggtggatccgaggtgcagctggtcgagtctggaggaggattggtgcagcctggagggtcattgaaactctcatgtgcagcctctggattcaccttcaataagtacgccatgaactgggtccgccaggctccaggaaagggtttggaatgggttgctcgcataagaagtaaatataataattatgcaacatattatgccgattcagtgaaagacaggttcaccatctccagagatgattcaaaaaacactgcctatctacaaatgaacaacttgaaaactgaggacactgccgtgtactactgtgtgagacatgggaacttcggtaatagctacatatcctactgggcttactggggccaagggactctggtcaccgtctcctcaggtggtggtggttctggcggcggcggctccggtggtggtggttctcagactgttgtgactcaggaaccttcactcaccgtatcacctggtggaacagtcacactcacttgtggctcctcgactggggctgttacatctggcaactacccaaactgggtccaacaaaaaccaggtcaggcaccccgtggtctaataggtgggactaagttcctcgcccccggtactcctgccagattctcaggctccctgcttggaggcaaggctgccctcaccctctcaggggtacagccagaggatgaggcagaatattactgtgttctatggtacagcaaccgctgggtgttcggtggaggaaccaaactgactgtccta

SEQ ID NO: 1632 - DNA, 735 bp, Artificial
  unknown organism
gaagttcaactgcaggaatccggtggtggtctggttcagccaggtggttccctgcgtctctcgtgcgctgcctccggtttcaccttcaccacctacaccatccactgggtacgtcaggccccgggtaaaggtctggaatgggtttcctacatcaacccatcgtccggctactccgactacaaccagaacttcaaaggtcgtttcaccacctcagctaacaaatccaaaaacactgcttacctccagatgaactccctccgtgctgaagacactgctgtttactattgcgcgcgtcgtgccgactacggtaactacaaatacacctggttcccttactggggtcagggcacgctggttaccgtttcctccggtggtggtggttctggcggcggcggctccggtggtggtggttctgacatcgagctcacccaatccccgtcctccctgtccgcttccgttggcgaccgtgttaccatcacctgcaaggcctcccagaatgtaggcactaacgtagcttggtaccagcagaaaccgggtaaagctccgaaagttctgatctattccgcttcctatcgatactccggtgttccatcccgtttctctggatccggttccggcaccgacttcaccctgacgatctcctccctccagccggaagacttcgctacctactactgccagcagtaccacacctacccgttaaccttcggtcagggcaccaaactcgagatcaaa

SEQ ID NO: 1633 - protein, 128 aa, Artificial
  unknown organism
EVQLVESGGGLLQPGGSLRLSCAASGFTFSGYAMSWVRQAPGKGLEWVSSISGSGGSTYYADSVKGRFTISRDNSKNTLYLQMNSLRAEDTALYYCAKPPGRQEYYGSSIYYFPLGNWGQGTLVTVSS

SEQ ID NO: 1634 - protein, 5 aa, Artificial
  unknown organism
GYAMS

SEQ ID NO: 1635 - protein, 17 aa, Artificial
  unknown organism
SISGSGGSTYYADSVKG

SEQ ID NO: 1636 - protein, 19 aa, Artificial
  unknown organism
PPGRQEYYGSSIYYFPLGN

SEQ ID NO: 1637 - DNA, 384 bp, Artificial
  unknown organism
gaggtgcagctggtcgagtctggcggcggactgctgcagcctggcggctccctgcggctgtcctgcgccgcctccggcttcaccttctccggctacgccatgtcctgggtgcggcaggctccagggaagggactggaatgggtgtcctccatctccggctccggcggctccacctactacgccgactccgtgaagggccggttcaccatctcccgggacaactccaagaacaccctgtacctgcagatgaactccctgcgggccgaggacaccgccctgtactactgcgccaagcctcctggccggcaggaatactacggctcctccatctactacttccctctgggcaactggggccagggcaccctggtgaccgtgtcctct

SEQ ID NO: 1638 - protein, 108 aa, Artificial
  unknown organism
QSALTQPASVSVAPGQTARITCGGNNIGSKSVHWYQQKPGQAPVLVVYDDSDRPSGIPERFSGSNSGNTATLTISRVEAGDEADYYCQVWDSSSDLVVFGGGTKLTVL

SEQ ID NO: 1639 - protein, 11 aa, Artificial
  unknown organism
GGNNIGSKSVH

SEQ ID NO: 1640 - protein, 7 aa, Artificial
  unknown organism
DDSDRPS

SEQ ID NO: 1641 - protein, 11 aa, Artificial
  unknown organism
QVWDSSSDLVV

SEQ ID NO: 1642 - DNA, 324 bp, Artificial
  unknown organism
cagtccgccctgacccagcctgcctccgtgtccgtggcccctggccagaccgcccggatcacctgcggcggcaacaacatcggctccaagtccgtgcactggtatcagcagaagccaggacaggcccctgtgctggtcgtgtacgacgactccgaccggccttccggcatccctgagcggttctccggctccaactccggcaacaccgccaccctgacaatcagccgggtggaggccggcgacgaggccgactactactgccaggtctgggactcctcctccgacctggtggtgtttggcggcggaacaaagctgaccgtgctg

SEQ ID NO: 1643 - protein, 251 aa, Artificial
  unknown organism
EVQLVESGGGLLQPGGSLRLSCAASGFTFSGYAMSWVRQAPGKGLEWVSSISGSGGSTYYADSVKGRFTISRDNSKNTLYLQMNSLRAEDTALYYCAKPPGRQEYYGSSIYYFPLGNWGQGTLVTVSSGGGGSGGGGSGGGGSQSALTQPASVSVAPGQTARITCGGNNIGSKSVHWYQQKPGQAPVLVVYDDSDRPSGIPERFSGSNSGNTATLTISRVEAGDEADYYCQVWDSSSDLVVFGGGTKLTVL

SEQ ID NO: 1644 - DNA, 753 bp, Artificial
  unknown organism
gaggtgcagctggtcgagtctggcggcggactgctgcagcctggcggctccctgcggctgtcctgcgccgcctccggcttcaccttctccggctacgccatgtcctgggtgcggcaggctccagggaagggactggaatgggtgtcctccatctccggctccggcggctccacctactacgccgactccgtgaagggccggttcaccatctcccgggacaactccaagaacaccctgtacctgcagatgaactccctgcgggccgaggacaccgccctgtactactgcgccaagcctcctggccggcaggaatactacggctcctccatctactacttccctctgggcaactggggccagggcaccctggtgaccgtgtcctctggtggtggtggttctggcggcggcggctccggtggtggtggttctcagtccgccctgacccagcctgcctccgtgtccgtggcccctggccagaccgcccggatcacctgcggcggcaacaacatcggctccaagtccgtgcactggtatcagcagaagccaggacaggcccctgtgctggtcgtgtacgacgactccgaccggccttccggcatccctgagcggttctccggctccaactccggcaacaccgccaccctgacaatcagccgggtggaggccggcgacgaggccgactactactgccaggtctgggactcctcctccgacctggtggtgtttggcggcggaacaaagctgaccgtgctg

SEQ ID NO: 1645 - protein, 251 aa, Artificial
  unknown organism
QSALTQPASVSVAPGQTARITCGGNNIGSKSVHWYQQKPGQAPVLVVYDDSDRPSGIPERFSGSNSGNTATLTISRVEAGDEADYYCQVWDSSSDLVVFGGGTKLTVLGGGGSGGGGSGGGGSEVQLVESGGGLLQPGGSLRLSCAASGFTFSGYAMSWVRQAPGKGLEWVSSISGSGGSTYYADSVKGRFTISRDNSKNTLYLQMNSLRAEDTALYYCAKPPGRQEYYGSSIYYFPLGNWGQGTLVTVSS

SEQ ID NO: 1646 - DNA, 753 bp, Artificial
  unknown organism
cagtccgccctgacccagcctgcctccgtgtccgtggcccctggccagaccgcccggatcacctgcggcggcaacaacatcggctccaagtccgtgcactggtatcagcagaagccaggacaggcccctgtgctggtcgtgtacgacgactccgaccggccttccggcatccctgagcggttctccggctccaactccggcaacaccgccaccctgacaatcagccgggtggaggccggcgacgaggccgactactactgccaggtctgggactcctcctccgacctggtggtgtttggcggcggaacaaagctgaccgtgctgggtggtggtggttctggcggcggcggctccggtggtggtggttctgaggtgcagctggtcgagtctggcggcggactgctgcagcctggcggctccctgcggctgtcctgcgccgcctccggcttcaccttctccggctacgccatgtcctgggtgcggcaggctccagggaagggactggaatgggtgtcctccatctccggctccggcggctccacctactacgccgactccgtgaagggccggttcaccatctcccgggacaactccaagaacaccctgtacctgcagatgaactccctgcgggccgaggacaccgccctgtactactgcgccaagcctcctggccggcaggaatactacggctcctccatctactacttccctctgggcaactggggccagggcaccctggtgaccgtgtcctct

SEQ ID NO: 1647 - protein, 506 aa, Artificial
  unknown organism
EVQLVESGGGLLQPGGSLRLSCAASGFTFSGYAMSWVRQAPGKGLEWVSSISGSGGSTYYADSVKGRFTISRDNSKNTLYLQMNSLRAEDTALYYCAKPPGRQEYYGSSIYYFPLGNWGQGTLVTVSSGGGGSGGGGSGGGGSQSALTQPASVSVAPGQTARITCGGNNIGSKSVHWYQQKPGQAPVLVVYDDSDRPSGIPERFSGSNSGNTATLTISRVEAGDEADYYCQVWDSSSDLVVFGGGTKLTVLSGGGGSEVQLVESGGGLVQPGGSLKLSCAASGFTFNKYAMNWVRQAPGKGLEWVARIRSKYNNYATYYADSVKDRFTISRDDSKNTAYLQMNNLKTEDTAVYYCVRHGNFGNSYISYWAYWGQGTLVTVSSGGGGSGGGGSGGGGSQTVVTQEPSLTVSPGGTVTLTCGSSTGAVTSGNYPNWVQQKPGQAPRGLIGGTKFLAPGTPARFSGSLLGGKAALTLSGVQPEDEAEYYCVLWYSNRWVFGGGTKLTVL

SEQ ID NO: 1648 - DNA, 1518 bp, Artificial
  unknown organism
gaggtgcagctggtcgagtctggcggcggactgctgcagcctggcggctccctgcggctgtcctgcgccgcctccggcttcaccttctccggctacgccatgtcctgggtgcggcaggctccagggaagggactggaatgggtgtcctccatctccggctccggcggctccacctactacgccgactccgtgaagggccggttcaccatctcccgggacaactccaagaacaccctgtacctgcagatgaactccctgcgggccgaggacaccgccctgtactactgcgccaagcctcctggccggcaggaatactacggctcctccatctactacttccctctgggcaactggggccagggcaccctggtgaccgtgtcctctggtggtggtggttctggcggcggcggctccggtggtggtggttctcagtccgccctgacccagcctgcctccgtgtccgtggcccctggccagaccgcccggatcacctgcggcggcaacaacatcggctccaagtccgtgcactggtatcagcagaagccaggacaggcccctgtgctggtcgtgtacgacgactccgaccggccttccggcatccctgagcggttctccggctccaactccggcaacaccgccaccctgacaatcagccgggtggaggccggcgacgaggccgactactactgccaggtctgggactcctcctccgacctggtggtgtttggcggcggaacaaagctgaccgtgctgtccggaggtggtggctccgaggtgcagctggtcgagtctggaggaggattggtgcagcctggagggtcattgaaactctcatgtgcagcctctggattcaccttcaataagtacgccatgaactgggtccgccaggctccaggaaagggtttggaatgggttgctcgcataagaagtaaatataataattatgcaacatattatgccgattcagtgaaagacaggttcaccatctccagagatgattcaaaaaacactgcctatctacaaatgaacaacttgaaaactgaggacactgccgtgtactactgtgtgagacatgggaacttcggtaatagctacatatcctactgggcttactggggccaagggactctggtcaccgtctcctcaggtggtggtggttctggcggcggcggctccggtggtggtggttctcagactgttgtgactcaggaaccttcactcaccgtatcacctggtggaacagtcacactcacttgtggctcctcgactggggctgttacatctggcaactacccaaactgggtccaacaaaaaccaggtcaggcaccccgtggtctaataggtgggactaagttcctcgcccccggtactcctgccagattctcaggctccctgcttggaggcaaggctgccctcaccctctcaggggtacagccagaggatgaggcagaatattactgtgttctatggtacagcaaccgctgggtgttcggtggaggaaccaaactgactgtccta

SEQ ID NO: 1649 - protein, 505 aa, Artificial
  unknown organism
QSALTQPASVSVAPGQTARITCGGNNIGSKSVHWYQQKPGQAPVLVVYDDSDRPSGIPERFSGSNSGNTATLTISRVEAGDEADYYCQVWDSSSDLVVFGGGTKLTVLGGGGSGGGGSGGGGSEVQLVESGGGLLQPGGSLRLSCAASGFTFSGYAMSWVRQAPGKGLEWVSSISGSGGSTYYADSVKGRFTISRDNSKNTLYLQMNSLRAEDTALYYCAKPPGRQEYYGSSIYYFPLGNWGQGTLVTVSSGGGGSEVQLVESGGGLVQPGGSLKLSCAASGFTFNKYAMNWVRQAPGKGLEWVARIRSKYNNYATYYADSVKDRFTISRDDSKNTAYLQMNNLKTEDTAVYYCVRHGNFGNSYISYWAYWGQGTLVTVSSGGGGSGGGGSGGGGSQTVVTQEPSLTVSPGGTVTLTCGSSTGAVTSGNYPNWVQQKPGQAPRGLIGGTKFLAPGTPARFSGSLLGGKAALTLSGVQPEDEAEYYCVLWYSNRWVFGGGTKLTVL

SEQ ID NO: 1650 - DNA, 1515 bp, Artificial
  unknown organism
cagtccgccctgacccagcctgcctccgtgtccgtggcccctggccagaccgcccggatcacctgcggcggcaacaacatcggctccaagtccgtgcactggtatcagcagaagccaggacaggcccctgtgctggtcgtgtacgacgactccgaccggccttccggcatccctgagcggttctccggctccaactccggcaacaccgccaccctgacaatcagccgggtggaggccggcgacgaggccgactactactgccaggtctgggactcctcctccgacctggtggtgtttggcggcggaacaaagctgaccgtgctgggtggtggtggttctggcggcggcggctccggtggtggtggttctgaggtgcagctggtcgagtctggcggcggactgctgcagcctggcggctccctgcggctgtcctgcgccgcctccggcttcaccttctccggctacgccatgtcctgggtgcggcaggctccagggaagggactggaatgggtgtcctccatctccggctccggcggctccacctactacgccgactccgtgaagggccggttcaccatctcccgggacaactccaagaacaccctgtacctgcagatgaactccctgcgggccgaggacaccgccctgtactactgcgccaagcctcctggccggcaggaatactacggctcctccatctactacttccctctgggcaactggggccagggcaccctggtgaccgtgtcctccggaggtggtggctccgaggtgcagctggtcgagtctggaggaggattggtgcagcctggagggtcattgaaactctcatgtgcagcctctggattcaccttcaataagtacgccatgaactgggtccgccaggctccaggaaagggtttggaatgggttgctcgcataagaagtaaatataataattatgcaacatattatgccgattcagtgaaagacaggttcaccatctccagagatgattcaaaaaacactgcctatctacaaatgaacaacttgaaaactgaggacactgccgtgtactactgtgtgagacatgggaacttcggtaatagctacatatcctactgggcttactggggccaagggactctggtcaccgtctcctcaggtggtggtggttctggcggcggcggctccggtggtggtggttctcagactgttgtgactcaggaaccttcactcaccgtatcacctggtggaacagtcacactcacttgtggctcctcgactggggctgttacatctggcaactacccaaactgggtccaacaaaaaccaggtcaggcaccccgtggtctaataggtgggactaagttcctcgcccccggtactcctgccagattctcaggctccctgcttggaggcaaggctgccctcaccctctcaggggtacagccagaggatgaggcagaatattactgtgttctatggtacagcaaccgctgggtgttcggtggaggaaccaaactgactgtccta

SEQ ID NO: 1651 - protein, 117 aa, Artificial
  unknown organism
QVQLQQWGAGLLKPSETLSLTCAVYGGSLSGYFWTWIRQSPGKGLEWIGESNYSGSTRYNPSLKSRVTISVDTSQNQFSLKLSSVTAADTAVYYCARGWAVDGMDVWGQGTTVTVSS

SEQ ID NO: 1652 - protein, 5 aa, Artificial
  unknown organism
GYFWT

SEQ ID NO: 1653 - protein, 16 aa, Artificial
  unknown organism
ESNYSGSTRYNPSLKS

SEQ ID NO: 1654 - protein, 9 aa, Artificial
  unknown organism
GWAVDGMDV

SEQ ID NO: 1655 - DNA, 351 bp, Artificial
  unknown organism
caggtgcagctacagcagtggggcgcaggactgttgaagccttcggagaccctgtccctcacctgcgctgtctatggtgggtccttaagtggttacttctggacctggatccgccagtcccccgggaaggggctggagtggattggggaaagcaattatagtggaagtaccaggtacaacccgtccctcaagagtcgagtcaccatatcagtagacacgtcccagaaccagttctccctgaagctgagctctgtgaccgccgcggacacggctgtatattactgtgcgagaggttgggcggtggacggtatggacgtctggggccaagggaccacggtcaccgtctcctca

SEQ ID NO: 1656 - protein, 108 aa, Artificial
  unknown organism
SSELTQPPSVSVSPGQTARITCSGDALPKQYAYWYQQKPGQAPVLVIYKDNERPSGIPERFSGSRSGTTVTLTISGVQAEDEADYYCQSADSSGSSWVFGGGTKLTVL

SEQ ID NO: 1657 - protein, 11 aa, Artificial
  unknown organism
SGDALPKQYAY

SEQ ID NO: 1658 - protein, 7 aa, Artificial
  unknown organism
KDNERPS

SEQ ID NO: 1659 - protein, 11 aa, Artificial
  unknown organism
QSADSSGSSWV

SEQ ID NO: 1660 - DNA, 324 bp, Artificial
  unknown organism
tcctctgagctgacacagccaccctcggtgtcagtgtccccaggacagacggccaggatcacctgctctggagatgcattgccaaagcaatatgcttactggtatcagcagaagccaggccaggcccctgtgttggtgatatataaagataatgagaggccctcagggatccctgagcgattctctggctccaggtcagggacaacagtcacgttgaccatcagtggagtccaggcagaagacgaggctgactattactgtcaatcagcagacagcagtggttcttcctgggtgttcggcggagggaccaagctgaccgtccta

SEQ ID NO: 1661 - protein, 240 aa, Artificial
  unknown organism
SSELTQPPSVSVSPGQTARITCSGDALPKQYAYWYQQKPGQAPVLVIYKDNERPSGIPERFSGSRSGTTVTLTISGVQAEDEADYYCQSADSSGSSWVFGGGTKLTVLGGGGSGGGGSGGGGSQVQLQQWGAGLLKPSETLSLTCAVYGGSLSGYFWTWIRQSPGKGLEWIGESNYSGSTRYNPSLKSRVTISVDTSQNQFSLKLSSVTAADTAVYYCARGWAVDGMDVWGQGTTVTVSS

SEQ ID NO: 1662 - DNA, 720 bp, Artificial
  unknown organism
tcctctgagctgacacagccaccctcggtgtcagtgtccccaggacagacggccaggatcacctgctctggagatgcattgccaaagcaatatgcttactggtatcagcagaagccaggccaggcccctgtgttggtgatatataaagataatgagaggccctcagggatccctgagcgattctctggctccaggtcagggacaacagtcacgttgaccatcagtggagtccaggcagaagacgaggctgactattactgtcaatcagcagacagcagtggttcttcctgggtgttcggcggagggaccaagctgaccgtcctaggtggtggtggttctggcggcggcggctccggtggtggtggttctcaggtgcagctacagcagtggggcgcaggactgttgaagccttcggagaccctgtccctcacctgcgctgtctatggtgggtccttaagtggttacttctggacctggatccgccagtcccccgggaaggggctggagtggattggggaaagcaattatagtggaagtaccaggtacaacccgtccctcaagagtcgagtcaccatatcagtagacacgtcccagaaccagttctccctgaagctgagctctgtgaccgccgcggacacggctgtatattactgtgcgagaggttgggcggtggacggtatggacgtctggggccaagggaccacggtcaccgtctcctca

SEQ ID NO: 1663 - protein, 494 aa, Artificial
  unknown organism
SSELTQPPSVSVSPGQTARITCSGDALPKQYAYWYQQKPGQAPVLVIYKDNERPSGIPERFSGSRSGTTVTLTISGVQAEDEADYYCQSADSSGSSWVFGGGTKLTVLGGGGSGGGGSGGGGSQVQLQQWGAGLLKPSETLSLTCAVYGGSLSGYFWTWIRQSPGKGLEWIGESNYSGSTRYNPSLKSRVTISVDTSQNQFSLKLSSVTAADTAVYYCARGWAVDGMDVWGQGTTVTVSSGGGGSEVQLVESGGGLVQPGGSLKLSCAASGFTFNKYAMNWVRQAPGKGLEWVARIRSKYNNYATYYADSVKDRFTISRDDSKNTAYLQMNNLKTEDTAVYYCVRHGNFGNSYISYWAYWGQGTLVTVSSGGGGSGGGGSGGGGSQTVVTQEPSLTVSPGGTVTLTCGSSTGAVTSGNYPNWVQQKPGQAPRGLIGGTKFLAPGTPARFSGSLLGGKAALTLSGVQPEDEAEYYCVLWYSNRWVFGGGTKLTVL

SEQ ID NO: 1664 - DNA, 1482 bp, Artificial
  unknown organism
tcctctgagctgacacagccaccctcggtgtcagtgtccccaggacagacggccaggatcacctgctctggagatgcattgccaaagcaatatgcttactggtatcagcagaagccaggccaggcccctgtgttggtgatatataaagataatgagaggccctcagggatccctgagcgattctctggctccaggtcagggacaacagtcacgttgaccatcagtggagtccaggcagaagacgaggctgactattactgtcaatcagcagacagcagtggttcttcctgggtgttcggcggagggaccaagctgaccgtcctaggtggtggtggttctggcggcggcggctccggtggtggtggttctcaggtgcagctacagcagtggggcgcaggactgttgaagccttcggagaccctgtccctcacctgcgctgtctatggtgggtccttaagtggttacttctggacctggatccgccagtcccccgggaaggggctggagtggattggggaaagcaattatagtggaagtaccaggtacaacccgtccctcaagagtcgagtcaccatatcagtagacacgtcccagaaccagttctccctgaagctgagctctgtgaccgccgcggacacggctgtatattactgtgcgagaggttgggcggtggacggtatggacgtctggggccaagggaccacggtcaccgtctcctccggaggtggtggctccgaggtgcagctggtcgagtctggaggaggattggtgcagcctggagggtcattgaaactctcatgtgcagcctctggattcaccttcaataagtacgccatgaactgggtccgccaggctccaggaaagggtttggaatgggttgctcgcataagaagtaaatataataattatgcaacatattatgccgattcagtgaaagacaggttcaccatctccagagatgattcaaaaaacactgcctatctacaaatgaacaacttgaaaactgaggacactgccgtgtactactgtgtgagacatgggaacttcggtaatagctacatatcctactgggcttactggggccaagggactctggtcaccgtctcctcaggtggtggtggttctggcggcggcggctccggtggtggtggttctcagactgttgtgactcaggaaccttcactcaccgtatcacctggtggaacagtcacactcacttgtggctcctcgactggggctgttacatctggcaactacccaaactgggtccaacaaaaaccaggtcaggcaccccgtggtctaataggtgggactaagttcctcgcccccggtactcctgccagattctcaggctccctgcttggaggcaaggctgccctcaccctctcaggggtacagccagaggatgaggcagaatattactgtgttctatggtacagcaaccgctgggtgttcggtggaggaaccaaactgactgtccta

SEQ ID NO: 1665 - DNA, 1155 bp, artificial
  unknown organism
atggtcctggtagtgctgctgctatttgccggcgtggacgcggaaacccacgtcaccgggggaaatgccggccgcaccacggctgggcctgttggtctccttacaccaggcgccaagcagaacatccaactgatcaacaccaacggcagttggcacatcaatagcacggccttgaactgcaatgaaagccttaacaccggctggttagcagggctcttctatcagcacaaattcaactcttcaggctgtcctgagaggttggccagctgccgacgccttaccgattttgcccagggctggggtcctatcagttatgccaacggaagcggcctcgacgaacgcccctactgctggcactaccctccaagaccttgtggcattgtgcccacaaagagcgtgtgtggcccggtatattgcttcactcccagccccgtggtggtgggaacgaccgacaggtcgggcgcgcctacctacagctggggtgcaaatgatacggatgtcttcgtccttaacaacaccaggccaccgctgggcaattggttcggttgtacctggatgaactcaactggattcaccaaagtgtgcggagcgcccccctgtgtcatcggaggggtgggcaacaacaccttgctctgccccactgattgcttctgcaaacatccggaagccacatactctcggtgcggctccggtccctggattacacccaggtgcatggtggactacccgtataggctttggcactatccttgtaccatcaattacaccatattcaaagtcaggatgtacgtgggaggggtcgagcacaggctggaagcggcctgcaactggacgcggggcgaacgctgtgatctggaagacagggacaggtccgagacgcgtatggaacaaaaactcatctcagaagaggatctgaactcgcgtatggaacaaaaactcatctcagaagaggatctgaactcgcgtatggccctgattgtgctggggggcgtcgccggcctcctgcttttcattgggctaggcatcttcttctgtgtcaggtgccgacaccgaaggcgccaagcagagcggatgtctcagatcaagagactcctcagtgagaagaagacctgccagtgccctcaccggtttcagaagacatgtagccccatttaa

SEQ ID NO: 1666 - protein, 384 aa, artificial
  unknown organism
MVLVVLLLFAGVDAETHVTGGNAGRTTAGPVGLLTPGAKQNIQLINTNGSWHINSTALNCNESLNTGWLAGLFYQHKFNSSGCPERLASCRRLTDFAQGWGPISYANGSGLDERPYCWHYPPRPCGIVPTKSVCGPVYCFTPSPVVVGTTDRSGAPTYSWGANDTDVFVLNNTRPPLGNWFGCTWMNSTGFTKVCGAPPCVIGGVGNNTLLCPTDCFCKHPEATYSRCGSGPWITPRCMVDYPYRLWHYPCTINYTIFKVRMYVGGVEHRLEAACNWTRGERCDLEDRDRSETRMEQKLISEEDLNSRMEQKLISEEDLNSRMALIVLGGVAGLLLFIGLGIFFCVRCRHRRRQAERMSQIKRLLSEKKTCQCPHRFQKTCSPI

SEQ ID NO: 1667 - DNA, 1158 bp, artificial
  unknown organism
atggttttgattgtgatgctactttttgccggcgttgacgggcacaccctcacaacgggggggcacgctgcccgcctcaccagcgggttcgcgggcctctttacacctgggccgtctcagagaatccagcttataaacaccaatggcagttggcacatcaacaggactgccctgaactgcaatgactccctccagactgggtttcttgccgcgctgttctacgcacataggttcaactcgtccggatgcccggggcgcatggccagctgccgctccattgacaagttcgaccagggatggggtcctatcacttatgctgagcctacaaaagacccggaccagaggccttattgctggcactacccacctcaacaatgtggtatcgtacctgcgtcgcaggtgtgtggtccagtgtattgcttcaccccaagtcctgttgtcgtggggacaaccgatcgtctcggcaaccctacgtacagctggggggagaacgatactgacgtgctgctccttaacaacacgcggccgccgcaaggcaactggttcggctgtacatggatgaatagcactgggttcaccaagacgtgcggggcccccccgtgtaacatcgggggggtcggcaataacaccttgacctgccccacggactgcttccggaagcaccccgaggccacgtactcaaaatgtggctcggggccttggttgacacctaggtgcatggttgactacccatacaggctctggcactacccctgcactgtcaacttctccatctttaaggttaggatgtatgtggggggcgtggagcacaggcttaatgctgcatgcaactggacccgaggagagcgttgcaacttggacgacagggacagatcggagacgcgtatggaacaaaaactcatctcagaagaggatctgaactcgcgtatggaacaaaaactcatctcagaagaggatctgaactcgcgtatggccctgattgtgctggggggcgtcgccggcctcctgcttttcattgggctaggcatcttcttctgtgtcaggtgccgacaccgaaggcgccaagcagagcggatgtctcagatcaagagactcctcagtgagaagaagacctgccagtgccctcaccggtttcagaagacatgtagccccatttaa

SEQ ID NO: 1668 - protein, 385 aa, artificial [sequence omitted]

SEQ ID NO: 1669 - protein, 5 aa, artificial
  unknown organism
NYGIH

SEQ ID NO: 1670 - protein, 17 aa, artificial
  unknown organism
LISYDGNKKFYADSVKG

SEQ ID NO: 1671 - protein, 13 aa, artificial
  unknown organism
SGGIALYWGEFDY

SEQ ID NO: 1672 - protein, 11 aa, artificial
  unknown organism
GGNNIGSTTVH

SEQ ID NO: 1673 - protein, 7 aa, artificial
  unknown organism
DDNERPS

SEQ ID NO: 1674 - protein, 11 aa, artificial
  unknown organism
QVWDSGSDHVV
